United States Patent Application Publication US 2022/0167576 A1 - sequence listing, part 9

SEQ ID NO: 30 - DNA, 35937250 bp, Oryza sativa (residues 16,911,649-19,025,604 of 35,937,250)
  misc_feature (5969519)..(5970518): n is a, c, g, or t
  misc_feature (13681864)..(13682863): n is a, c, g, or t
  misc_feature (13684155)..(13684254): n is a, c, g, or t
  misc_feature (18795366)..(18796365): n is a, c, g, or t
  misc_feature (24815509)..(24816508): n is a, c, g, or t
  misc_feature (35936251)..(35937250): n is a, c, g, or t
ggattgagagaaaaccagcgggctacagatttgtagctagttgtgcgtatagtaagtaggactaggtattaattgtgtatgaattaactattaaattgactgtaaactatttggagctaatagttggctatactattaaactttctcttatcttatgtgaaaagtcaacttacaaaagaaacaaaatatcgtaagaaaccagctgtgacggtcgtatgtagtaagtgcatcagcaatcagtggcgggcgtgtataccgacgcgtctaagatgtggttcctgtggaacgcctggcctccccctccatccagccatcccagtcaccctccatcccccggaatctgccgccgccgaggccgccggagccgaagcagctggctccccgggagtggaggccgagcgatccacccaagacggcggcccgacgcccagatctgacggctgacgccggcctcctcccccgccgccgaggcctcttcgccgacgccgcgtcggtgcgacgccgacgacctgagcgagctcttcaggccctatggcgcagtcctctccgtcgaggtacagcatcccaaaccatcctccattgctcgcgatatcttcagtgccaaccacgcagtagcggggtacagctcgaacagttacgttacttctaagaatcacagactgacttgaaccaaaattttcatcgaaccactcactaactaaatgaatggatttgggcacacctgaaattctcagtctgcaagtgagttgggagctcatcatttatgcaaggacttaggttttgacattgttcatttagttaagcaggcctctgagagcttaattgcagaactgcagaattgcttctttttttttatgtttcagattcttataatctcttcgcaaactctgtagctccaatagttcatgatgaacaggaggcttttactgttgtggttcgaataggaccagacatttgggagtaaagaattgcaaatctaaattaatgtgctgagtttatgttctcaacttatgattaattctgataaagggaagcccattttatttcgttgaatttgtgtgctgtgtgatatctatgtttttcttatctaagtttactaattgcatcaaaattcggaactgaggctacacttatagaacagaaataatgtagcctattttaatgctgtgatttctaggatttttttttctaagtttagcaattgcatcaaaattcagaactgaggctacacttacagaacagaaatagtatagcctatttgaacactgtgatttctaggggtttttttcctaagttaatcaattgcatcaaaattcagaactgaggcacacttagaaaacagaaacaatatcgcctattttaattctgtgatttctaggatttttttcccctaagtttagcaatttgattaaaattcagaactgaggctacacttagagaacaaaaacaatatagcctatttaaatgctccatgtataggattccaaaattagatttctagaacatcctatatcattccttcctgtttaagcagcaaacttctatgttgaactttgtttaatcataccattcaagtgcagtaactattaatgaaagagtggtctggtttaatctgtaattttgtctggacagtagaagagaaaaatagaagggacggaaatactgcattctttcatgctgtaggtaaccagagaaatagggaaaaaaaaacatatcgatagcctagattctagaaggccagaggctcctgtttaggataataaaggcatgcttaaaatttctatggattactgcaacactcgttttgggtattaaaacaaactgaatgtctctctacaggacaagttctgatctctagatgaaaaagttattgctgagaagaaccatattttggaaaagatttctctgatgatgttaaaaaaggctgtttttgatttttatgcgaaaggggacccaggtcctgatggtttctctttcatgttttgtcagaaattttgggtgtaatgaggggtataattaaacaactgctgtttgtacctagtgtaatgtgtggtatgaatctgtttgtatagcataaggccgatgagcacaggttattagttgagtgaagatgataataagttggcatttgcagtttgatgggatgtgcactagtgtcgctaatgaatgctttgcatcttataatgcttttcatccgggaacttttcactttttattacacactgatgagtacaagtgtttatgcattgattagttgttcatatttagaaatctcggtttatctccttctgaaattatgtgtatgtgaaatgttgtgtgataactttgaattctacgaacattaaagggaatatatcaatgtctctgtgaatatgattgtgaaatgtctagtgctgtgaatatcatattattattgccagtgttctgtcattcattgctaaaaaaactatttttcaatgctggtgataacccctttatacatgtatttaccgaactgcttgtgatttaaggcctacataaatcaataacttagttcctcaggcgtccttgaacctcttggagaaaaccatatctccgtgaaaattaatttctactttttttttctttttgtaggtgaaaaaatatttcactttttactaggcgtctagtatagtaaaactacactatgtcactctacttgtaggctcttatcatctcaattatcaagcactttagactagcctaaaactacatttttaagagaatcattcatcctgtgcatttggaagccatctgtccaagcttcgtgttacattctgaaaaatattgcattgcactgcttccaagtatgccaacaacccaatatactatatcaaagagcttttcctacgaaatttgagccttgcaagctataatctgatggaagtccaaagattttttccagggaattgttccacttgctccataactgtaagttttgcagcatttggcggcaatcagtgcttgtgatccacttttgctcactatttgttcaggtttgaatacaattgtaatttgagccattagtgactgtatgtctcattttgttaaaattatgaccggccatccttttcgtgtatgtgcctgtattgggctagatcatgatggtatattctacatcttgttacagctatgtgatacacttgtacttggcagatgatgccagacttttcctatgtattgggccttatgtgtatttgtaaacaaaaaaaagactttcttgagaggacgctaaaccacgctttaatacctgctatcctggaatacgtagtattaacttctattgttccaaatggatgcgtttaccttctgaacattatcaaaatttacctctcattcgttatgccagtgaaatttccaagaacccgtttgaaatacggacaattttgtttgagaattgaattgttttcattgttttttttttttgaatttctgtgttcaagaaggggacatttactgaagagcctaaagcataatgtgagctatcatttttcattttagcaagatatgtaacctttatttgactagtcatgcaatatctctagtgactatacaaggacacaaatccccaataaatacctcatggcacaggacataaatttcttctacaagacatcggttttagcaaccgtttccttatttgacttatggggctagcaagaatagcgtccacatcagtgcacaaaggtgtgatacagaagatctcaagcacataggccactaggacactacagaacaagctgacgtaaggggagagaaaaaggaaaaaggacagagccagaaggacaagaggccaagtttagcaacgcagagcaaacggtaaacccacaaacacaaccatcccctccttacttctgcccccatcccaaaccctaccgcctccagatcccaccctctcgccaccgcgacgcttgccggaggttcggttccagccatgcggatccggaggaacgcctccagggtgctcgggtcagcctacttcaccacacagtcggaagcatcacgcgcatatatgagcaacctcccaccgacatcgtccgcgcctgcgcctgttgcatatggcggcggcggcggcgatcttggtggtcctatggtcactccagacgatgcttgccagctaagcctgtcgccatgggatctgccatatgagctcgaagatcctgatcccctggtaagctttcgataacttctccctcacccaggccatcagatctagatgcactatgcttgttattaatttcgtttcttttaaccacctctagttttaatgctccgtgagagttgccaatcttgcttgctatgttccacttgggtttttggtgtgatggaccagcggtctcgctctccgatggttctagggttccatctgtgaaagagattagagtcgtggttttgacatttaaggttgcttggtggggagtagggaatgacagaaattaatcacatcaaccagcaagatcaagcttccggcaggctttatgggcttcttcaacccaagatttaggagtcatggggcagctagggttggggaggggcggaaatggatgccctagatctggctatccgtgaatattattcgatagctctctggctctcttttctactcccttcatcccaaaatataagcatttttagcacattggcaggtcaaatatttttaactttgaccattaatagaaaaaaattaaaaaagatcaatcatgtaattgatgttactagatttatcattaaacaaactatcataatatgcaactattttaatttaaacatcttatttttatagatattgttagtcaaagtagcatatcgaagaccgtgccagggtctaaaaatgcttatattttgggatagagggagtagcttttttatgcatgttgatctgctaaaatagagtaaattgcgccgttggtacaaaaacttatgaggtgggtaggatttggtgctcaaacttgtacgtctgatctgtgtgtaaactaaaaccaaaacatgtctaactgatttcactagtgacatattaggttgggggggggggattgttaagagggaatgcaagttttgaggggtggggaccgttaagtctatagattggttgatagacgtgagagtttcaggatggatatggaggggagtttaagagcaatctcctaccttttcaatactagagaattgaactttcgtcgtggtacccaaaatcacaaatatttcggcaagattaagaaccggtagtaaagatgctttagtacgggctttaaaagtccaagtccctagaaacatttttttgtcccggttggtgtcaccaaccgatactaaaaatacatctttagtactggttggtaaaaccaaccgagactaatgttggaggatacttttagtaccggttagttcaaaaagaaaatatatgtatccaagtcagatgtgtgtactgtgtaggatggtaacacgcgtgaggactgaggtgagagatcttgagttcgaatcccacatcccacatatttattttgactagaaaaaaatgctcgagcgttgcaacggtaaatgctattttaattttattattgttttacggtttagtagggtaaaattcgcttggataaattttttagaaaatcatgagctgcaattagaagtccatattgcatctcaagttagcatgtgagtttttctaaaagattttttatacgactccttttatacttcaaaaagaaacaagcttaaaatctaactcaaacacggatctgtatttccaaatatgaacgaacttaaaacccgactcaaatacggatgacgtacctaaataccggcaaaaacattttcaatttttataatagtagagacttggtatgcatataaagatcgagatctttagtctcgattccggggtttccaaccggtataaaagatgagttctctactgatgtatatatgacaaataaatatgaacagtacgtcatcatgtggaattcaattctcttccatactcattctcgtctctacgaccaaacaaagaactaggagtaaaaatgaaactcccataaccaacccctgaaccaacttcctcctccaaactttcaatccatttcctgctgttgtcaaacaggccataagttgaacgttgattaggatgtgtaggctcgaatgtcaagataatattacgtaaatatccatatgacaattcatgttaattatacatattaaaacatatataaaagggatatgcaatgcatacaaaataattaaaaacaaaaataactacaatatgtataaatgttaattatttacgcatacaacatatcttgtgctctcatatgcgtgtgttttgtgtactaaattatacccacctgataagtttgaatactacaacgcagttaactctctaaaaaaactgtggatttttttgtgaactgtacaccacatatatcaaataacttatgtttctcttgcttagttcaatttatatctcacaatatgattcaaacctttcaggaggctccgttcgacaggtacatggcgtgcatcccttttagggcaagctttgtgtccgacagcgacaacaacgatgatgatcagatggaggtggacgaagacaagagttggaatcaggtggagaatgaggaggtgaatgatcagcagcaaccagctgaccacaaggtggaccaaagtggtgatccggcagccagaaagatgaaggggaagatgaacgagagcagcatggtggtgatggagatgcaagatgctgacaagcaggctggtgtttggtactgcaacaagaatgatggcaagaaatggcactgccgaaacatcgtcgacgggcccaagaccctgtgtgactaccacctagcaaagagccgctcttactacacccgcactggtgaggcaggtgctgcagctagttccaagtcaggccgagcaaaggcaccagctattgccaagccaaagtccagttccaaacgaactccagcaggtgagtcaagtgctcaaaacaactctattgcagcagcagcagcagcagcagtgagtgtgctgccaaccatctcctcccagccatccaagaggaaggcaagcaatggcttattaggtggtgatgcctactatttctatgatatgttcgtcccataccgcaagaaggatcgtggtggtagcagcagcaaacagcaagccggtgctgaggagaaggagatcctgccacaagataatgccgtcgccatggaagagaaaatggacggcaagaaactgtacgatggtgtttacaactcgtctgattactcctcggacactgctagcgacgacgagagcgacgaagactataccgttggtggtgccagcaagcgccgtaccaagaaaaggaaaatgaagctttcagtgaagaaggtgcagttctcgaagatgacgaagaagcgtgtgaaagaacggtcgcttaagtccctgctctaagagttctaattcgatcggttgtctgtgggacagtttcagtttagccgtgttgtcgcttaatggcatatcatgtatggatttaagacgtgtaccgtttaaataaatgtttgaaccttgtgatgtttatcagacataatttcgggttgttaaatttagtgatggtggtcaaggaaataatacaatcaaacttttgatataatttaatatagtgagcgtagctaaactggttagctcttttgtgcaacctatccaggttcacgtcatggacttacgactacttattcttttattagttcgcaacggatagcgagatattactaaaaccaaatatcaccaaaaatagtcatctgcagactgcacctaggtcgatttcagcctaacactgtgttctctttcttctgggtgttctgctccagcctttatcttcctctgtgttgcctaagcctcgacacccgggaccctttggtagggatgaaatcggttcatatattcccgatatccaaattcattttcggaaaaggatagtttcgaacagataattattggacagtaattaatacgtatagtttttcttctcaaactgacagtaagaccagatcagtatccagcgaaatcggttccagtcagaaactatatggatttttccggatatccacatatagcaatcaattttttaaaaaaaacacatatgtatacataactttattatatactagaaaaaaatacccgtgcgttgtaacgggtgaaggctattttaatcttattattattatatgtttcagttaaggtaaaatctaatgtgagaactcgtttgaatatatatatatatatatatatatatatatatatatatatagaaaatcatggtgtccgatcgtctcaaattagcatgcgagttttttaaaagagatttcttatacgattccttctgtatttccaaaagcgaactaatttaaaaaccgactcaaatgcggatctgtatttgaaaagaacaaacttaaaaaccaactcatgcacggatgacgtaccaaagtaccagtaaaaatatcttcaatttttataatactagaaaaaatatccgtgcgttgcaacgggtgaagactattttaatcatattattgttagattttttttttgtctaaaaagtatatgggatttttattttgagatgatatccaattcgaaacccttgtatttttaaaagcaaacgaattttaaaaccaacttaaatacggacaacgtaccaaaactatcaacggaaacaacttcagttttaataataaatcacttaatcctaaatagccgaaggaaatcatatgttgaaaaacttacgttaaaaagaatcatgtgtagatgaatccttcacaaaataaacggacatgcatgcaagccacccatacaaaaattagtatgtttttcatttgcatgtgtacaaaattattgaaataaacatagacaaatctggaataaatagtatgtaacatatgcttagaagatgggcaatattttccactaagacagctcaaaataggaagacagattgtgatagacgttgggcccttttacaattttaggcccatatatgtgcaaaaacgtattggatgtggagagaaaataaaaggaaacgtgaatatggtcaaaatgctaaaaacatatatgaatcggaacaagacggcttgttggaacgaacggatgacggacgaaaatttgatgagtataaaattatcttcaattcttataataggtaaagattacgataaacgttttgttctcttttgaaggcattttttggtttttttgccttttttattattttggatggatttttttttcacggactgcttgactgccttttttattgttgcatacaaaacgaataataaaaatttttaggaacgacgttttttcgccgttctcggggaatcggacttttcttctgggggacttttttgctcttttttttatttttttacggacgtttttttcaccattttacggggaatcggacacattttctttttaaggcggtccaattaattcgctcggatggaaacattaaattaaaacctatttaaacacgggtgacctatcaaaatctcggcaaaaacacctttaatttttataatagtagagatagagatagagatatatggtttagttaagatgaaatgcattgtgttaaattcgtttggatatatattttgttagaaaatcatgagttacaattagagtctgatcgtctcaagttagcatgcgagttttttaaagagatttcttatatgatttcttctgtattttcaaaagcgaatgaacttaaaaaccgactcaaatacgaatttgtatttctaaaagcaaatgaacttaaaaccgacccatacacggatgacgcactaaagtaccggcaaaaacatctttaatttttataatagtagagaagtagagatgagaaatataaatataaaaatagtagagaagaattttatttttaaatcaccaagagaatataatttcaggtcatacgcacaaagttctcaaaagaaaaatatatcatatgcacaagctgtttggtggctaaaggcagcaggcccatttggctcatgtgggggccggctgaggacctgttgtagacttgcagtagggggctgtgggcagatggccagccagcccagagaggagatcagcaggggaaaagtataccggaggtccttgaacttgtcaccgagataaaaaaacgtccttgaatcgcaataccagacacccggggttccccaagtatataaaccggtcacccgagatcctcgatagttttgaccccggttttggcctacatggcggctaagtcggtgtgggaccctcgtgggccccacatgtcaggtgtccacatcatctctctttcccctcttctttcttcctccctcccctctctgcactctctctcgtaggtcgggccgacgggtagggagcagacggctgggcggcgagcgaggctgagcggcggcgctgcgacggcggcggcggcgacgtcgccctcttcttcttctcccgctccctggaccctgccgctcccgctccctcctcatctccctggacgccatggaccgggtgctcgcgctcgacgccgcctacccgctgcctctcctccccgtcatgctcgacaagttccccaaggtcgtcgagcccgcccggtggtggcagccgactaagaagcagcagtagcagcagcgtgctccgatcttcaacacgtcaaaggtagcggcaaccaatggcgccgcgggccggcgagccaccgccatggccgggaacggctggacccaagaggtggaggaggagatgcgcgacatcctccgtgtcatcagggccaaggacgagaacgagtacgtgtcagtcggcaagctggtcctcgccctcaacaagcgcctcgccatggcaggcccggcgctggccggcgctgccacgctcgccgcagcgttcatcggctccggcgaggtcgtagcgtaggcgtccggcgtggcagtcctcggtggcgcgctggcagcggcggtgaacaccgtcgagcacggcgggcaggtgggcatggtgtttgacctgtgccgcaacatggccagcatctaccggaagatccaggaggacatcgaggcgtcgcctcaaggaggccgacgtcgagcagagggagaactgcaaggtgttcgagacgaaggtggcgctgcagctcggccggagcacgttggagctcaagaagttcaaggcgatagcctcgccgacggtcaaggacgaggacatcaaggaatttgccgggagggaaggtggactgggcggagcacgggtcggcgccgccgccgtggtggtggtcgcagtacttcacgacgcgggagagggcagcgcccttgacgacgttggggaggttgacgacgaagtcgtcctcgccgctgccgtccgccaccaccctcctcgagcatcctcctaatcgtgcccgacgctgcggcgatcaccttcgatgaggacggagcaggagcggcagggtccagggatcagagaagaagaagagggcgacgccaccgccggccgccagccgccgtcgcggcgctgccgctcagccccgctcgccgcctagccgtctgctccctacccgtcggcccgccgcccggccttgagagagagagagagagagagagagcagagaggggaggaaggcagaaagaagaggggaaagagagatgacgtggatacctgacatgtggggcccacgtgggtcccacgctgactcagccgtcacgtagatcaaaaccggggtcaaaaccacccagggatctcgggtgaccggttttgtatagttgggggaccccgggtgtatgatattgcggttcagggacgttttttatctcggtgacaagttcagggacctccggtatactttttccgcagtgagccagagaggagacgcgcaaaaagctgggcccatctctaagcgcatacatgcgcgagaaaaatcagagacttgatgattttccgcgcgccgttgataagaaaatcggagatgaacgggtttttttaatcttggacaaaatctttttacggacgaaagttttttacggaagccatatgtaattttttattagtatatatagatatatatatatatatatatatatatgatttagtaaattttcatatctattaattatataagattaagtaacttttcttttatctttagaagctttatctatttcttttttatctttacaaaaacttgcatcgtgtccaataagaactattataaatcagtgggcataaatatgtataccgggatttattaatcaatctctcgataatatataattttcaccgcattgccatcttctatcccatcgagtcattcgtttcgatttatcaatctaggaatcaggaaagtacatccgtcccccatggccgccgccaccagcgaccacctctccggcctccccgacgacctcctccggcacatcatctccttgctctctgccaaggaaggcgccgccaccgccgtgctctcgcggcgttggcgtccgctgtggcgccaggcgggcaccgtcaacctggacacggagccctacttgtacccggcagcgtacagaggcaacaacttcccggagcacaggcggagcgcattcgtcggccacgcgctggccgccctcgccgcgtgcgagagcccgagggtcctgagccttcgcctcgtgtcggaggagatcgagggaggcgctgccgaggagaggtgtgccggtgtggtcgacgccgtcctggacgccccggcggcggcgcgcgtcgaggagctccgcgtccgctgcgccgtctcgtggctctgcgagcacggcagctgcgagcgctcgagctccagcggaacgtggcggctgcggctcggatccctgccctgcgccgcggccacgctccgcgttctgcacgccaacgacgtcggcgtcgaacgcctcggcgacggcgacggcggcgtcgtcctcccgctcctggaggagatgcggctggtgaaagccaccgtgtcaccggagacgctccagggcgtgatcgacgccgcgccgaggctcgccaacctgtggctcgagaggatcagcttcaggagcaacgacggcagccggggcgtctacctcgctgacggcttccgcctccagctctgaggcccggcgctcaccgagctagccctcatcgggtattacagtagagatcgctgcatcgagctcgacgtgtcccgcctacgctccttcgtaaacgaacgctccctcccggggcgcttctccttgacctcgccggcgccggacctcgcatccgccgaccttcacttccacgaccaccggagctatggcgacaaagatcccaacaacttgaccgtacccatgtggagctgcctccggcacctgcacggcgtgagggtcttgaagctgcagctggacttctatgcagagtacatcgccgtggacgccgacgacgctgacgacggcgtcctcgccacgttccctaaccttgagtacctcgagcttgacgcccattgcaaggatgatcacgacatggccacagaattgacagtagcaagcgtcctccgatggtgccctgccatccgtgagctacggctcaggttgtcagtagccgatgctgaaggccgcgtcaatgtgatctacaacagcaaacggcacatgatccatcacgcaagaatgatgaggaacagctttggacaggatgtgcaaaccaaaatttatgttgatgtgaccaacattacgacatcctcgccgtaggaaattagaacacaagacagattacgtctgtgttagcaggttcagttccatcatcatgtaataatcggacttgttactttattagtggatgtttttttttcatactagcaaaagtgcccatacgttgcaacggaaagaaaaaacgagaaaattgaattaaaacatattaaattctaatttaatgaaatacaaatttcctagatattaattacactatttgaaattttagcaaaagtgtccgtgcgttgtaacggaaagaaaaaaaagagaaaattaaattaaaatatattaaattctaattaaatgaaatacacattttctggaatatttgggtattttttaagtagttagatatataattaaattaattttcaagtaaagtaagtgtgagaaataaaatgttatgcttggatttaatttatattaaattttctatattaattacactctttgagattttcttgaaatttacagagcttaattgataattttaataatacaaatatcattttagaatttatttaaataaaaaatcatttttctctatgggccattttcagcccattttcttcttcagcccgcaagcgctaaagtatacttaatatccccatactcctctcacttgctggaccgccagcccgcatgcggcccaaatggtgcggcccaaacgcttgatcgatctgatccgttcgttttcatcgacggctcaaatcggttacctcccatgccccagactcgtctcttccccgcccgcgacgctgcctctccccctccccccagccggttgcctcccccgccaccggcgccgtctctccccccaccggcgctgcttcccctcccttctcgccggcacggcgcggcgacggcggggtgcggtggagatggcggcgacggcgccctctctatggcgcgtcgacggtgacgacggcgtcggcagcgtccgtgctccttctctccctcttcttcccgtcttgccggcacgacgcagcgacggcggggtgtggcggagacagccgtccctccccctctccctctccccgtcggcctcaacggtgaaggtgccctcccaatggcatcgtcgatggcgacgtggtgtcggcggcgtccgcgggtggatccgtcactggtagcggcgaccgcaagcggatccagtagccgtggctccctccgccggctctcttcttcctttggtggcaatgatggcgtcggtggctgaggatggtttttctttttttttttttgcaattttttctatcgctattgataaccaaatcggatttcgtacggaagaaaacacggatgaaaattggatgtgatgaaaggaaaattacgaatcttttaattagttaagatatcaaaattgtagagcttgatgataaactttatatcaaaattgtcgatcttgacgagatctacaactttgttattgatatctatatcatttgaaatcattttgaggtctaaatattcgttacaaaatctcatagctatgttttacaaaatctcagaccaactattcaaacaatctccgatggagacgtgcactgtatcaaagttgcatatatatagcttgatgggattgtgacatttttattttaaattatttggagcgcaaaaacaatcatgacaattgatgaaataaaatgaacggaatagcatcttcaatctaaacatcgattctgattattacactctgtaacgtgcagaggcacacgcgcgggccgctacatacatgacagctggtggacacgccgctctgcccgttgcgacacaccagcctacgctgttttgggctgacgcaccaagcaagcgagcgaggcacagatgcttcggtggtaccaaggcgccaccgcaccgccacccatgtcagccacagagcaacactggctgcgcaatagtttactacgagccccgtcgacgagcgcgccagcctgccgctggcacaaaccccggccgacggggacgccgccgctaccctcccaattccggtcgtctcgctctcgcggtctatctacccctagcccgttcgggacagcgcgtcttccttcttcacggaagagaggacggcgctatgatttgccgatgaccgcgagacctgacccgctccacaccacgtacgacagcaccggccggcaccgcgcgcgtttatacgacgcactcatcctgcgccgcttttcgcaccgcaagggccgcgcgagtcaggacgaaccatgaccacgccacgctgccgtgccaccacgaccgtggacgtgaggacgatccgcgagttcgaccttcaccgacccataccttgatgcaaatggttttgctgttggccgatccggtgtactgcttcccggctaccgcacagtgcatgaggaccctcactcttcccttcattccccctcctcggtgcttttctgaatgtcacgcagtcaaagtgacggcgcagccgctacacggcgtgccaccacgcccgcttaccatgcgcctaggctgcacgccgctaccaccggagcatctgtgcctgatcggcttgtcggagctggccaccttgtcagcgattgtctcacaaaaccacgaagacgggacgatgattcacaccgctcgctgttctgcccagacgcctaattggccacgccaacataccaagtgcatggaccgtctgttggaaacgctccctttcccggccgcggggggcctcaaccaaccggccaccgtctctaaggcatcctaggtcaaaccctctcaccgataggctcccctagtcccacacccctcgtcgtcgataaggctcatcggtgttttgcttacgccgctgtactgcatcaagcccgctgaggattacgcccctatccgcagtgctcccctagtggcgctaaataaagcaaagtgcttccttagtccctacgaagccatcccaagcaccgtgccaaccgattgatcgctgactccaacaaatttcactggaatcaaacccacaccatctcgcctccaccaccctcatggacatgccgccacaaccccacctagcaaccaaccgcattcctcgcaggctttggcaagcctcatcgatgcccttggatccctacagcctcttggaccctccacgtccacggccaccacttcgttgacgtccatggaaaccatccccgactgctacctcaatcagcccttcccaccgcttgagaccacctcaaccggcacgccgctgcctagatatggcagaggcttcctgggttttccccttgccaggcgcaccgtcttccaggctacatgtctccttcatgggctaaccctagcgatggcgagctctcgagacaggatcacaggggagaagagagaagtgaggaagatgagagagaaggatgtcagtattatatatgaataaggcataccaaacactaatctattaaccttggtggggcccaacatatacaaaggcgtatgcggtataaagactcatatacggaagatgttctcgataaggaaagagaaagaaagtcctactcgagcattgcatggtctactcgaatcatagaactatagatctaacaaaaaaattattatagaactctagttctaacaatacatttatcacaaaactacatgtttaagactggtatcagaaagctatagatttaataataaaatcatcacaaaactacagattttggggtttaaatccttaccactaatgttatgtttgagttataacatccaagttttgtgattaaattaatattaaagttgtagttttatgatatgttttttattaaatatgtagttttgctatattataccataaatctgtagttctgagataaatttagtggtaaatttgtagttttatgacataacatgttggttttcttataatttggccaaagcacatatagctctgtgaaatttactctttacaaaacaaaaaggttgtgggacccacctttcagtgagacaagatattttcctaacgaaaaaaaatctagaaaatagctcacccattttaaatcagatttcaatgaatctttcaccaaaattcttttaaaatcaagacatatccattgacacatgtttgacatttttcatatttttctaggattttcgccttttcgttagaataggaaaagtagctatattgacgatcatctgtcgaccaagttacatttgtgacgaagaggccgaaacagtcgaggaggagccattgactgagcagggcaggtcaccacgcttctcttgttgagcatattgatcccatgttcatgaatatttgcaaataaaattgcatgctaattataaaatactccctccgtctcaaaataagtgcagttttgcactattcacgttcaacgtttgatcgttcgtcttatttgaaaattttttatgattagtatttttattgctattagatgataaaacatgaatagtactttttatatatatgtgactaaatattttcaattttttcacaaattttttaaataagacggacggtcaaatgttgggcacggatatccacagctgcacttattttgggacggaggtagtatgtacctaaaactcgatgataagccacccttgaaatctatatccaaattccttgttccctgcatcttatttatatgtgctagtcacttatcaacatggcttagcaatactttataaactttcgtacactatgtttgaattatggatgagattatggtggagacacacactggtggagaaaccatctttcgtcggtcggccgatttccacaatagtcccggatacaataaaaaccggggctaaagatgatctttagtcccggttcaaaagggtaacgggcatatttgatctttagtcccggtttatattaccaaccgggactaaagatcatttttagtcccggttcgaatgctgtcagggcctgtcaggccccccccgggatctttagtcccggttggtaacaccaaccgggactaaagatcgtaactttagtcccggttggtattaccaaccgggactaaagatcccggtgatctttagccccggttggtgctaccaaccgggactaaagtcccacccctatatatatgtcttcttcctcctccagctgcccgagcaagcttcaaaatttcttcaaaaaagaggggaggtcatgccaaaatttctattgaatttattttggtgattacatacaaatcggaggtgcctaaaaggtttgcaacttcatcctccaatgtttttttttgtcatactacatttgcacctatgttttgcacactttttttgtctccaaaatttagttgtaagttgatgagagagaaaatgtatgtggggaagaaagaatatatagaaatttagttcatttgctaaacaaggttttataaaatagttgagaaggaaaactctagtgaaagttaatcttaaataatagaaaacaaactaaaatgaaaattaaaagaagtaaaacacattaaaattagtttaaaactttacaaatagtttttaagaattatttggtgtaatattttatgatttttgtatgaataaagatatcttataattattgtatgactgtcattattgtaagaataattatttgtgtatggtttttttgactcatgtagatggatcgacaatggatgtacgctgaccggcggtccaaagagtttattgacggcgtgcactattttttgagagtggccgaagctaacaggcaaaggggttttatttgttgtccatgcaataagtgtaagaatcagaaggagtctgcatccaggactattcatttccacttgtttgagtcggggttcatgccaagctataattgttggacatcccacggagagcaaggtgttgaaatggaagaagatgaagtggaagacgacaatattccggactttgctcagtatgttggatttgaaggaaatcaaacgggcgaggaggaaatagctgctgatggtaacgacgttgcggattgtcacgaccggaaataacccaacgggcattccttacgtgcgtgcattaatccttgtcccaggaggcaaggtacaccaaaagttgatacaattcagagtataacaagcggaagcgtaaatagttaatttattacatgggcagcgaaggcccagcacactcagagacaaacgagaaacagcggaagactagggcgacgaccacaggcacttgacggcaggcacgagctagacaccgaagccttcatcctccaggaactcctcttctgggtttgggaaaaattgagcaagactgagtacaaccaccgtactcaacaagacacacccacaagtgcagaataaatgcaagggagtacaaaggagttataccataaaggggttagggttgcaataaacagcatttaaagacatttagttgctcagggctattttgtaaacacgattctagaactaaacaatattaattatcaaggccgtgaacccacacgaacctgccttaacccaaggcctacgatgactcagaccgaactggcaacccgaccctgggtcccagctcgtcccaagccaacccaggccaaccattccatattttagttgttaagcaagttttaagaattaaaacactaacttgggtacattgctcggcttgcccataaccgagggcgcggctattcgaataggttttactctgatcagaggtgtacatctttacccacaagacacatcttcctcacgtgtaaccacgtgccacataccaccacggtatacagacggaagacgtgacatagtttccaacccatcctagccatagacaagagtaccgacccaatcccacctacggccggaacccccgggacaggcaggcaggactgagcccctagcagcaggacaccggccctgtgccatgacatctcgactaccgggccgcagctcgtgtagccttcatttgccctggagaatgtccatcgacccccgacttcatccacctccatccgtgtacttttgtttataactagactgagccacaaactaagccttacccactagacatgtggaagtacggtagtgctttgcaacagaggcccgaagaccggtccttatatggccgaggtgctaccatcaaaaccatgcaccccgagcccagcctaaaaccattttggggattttgaatagagggggcggtgtgaatccaattccacaataaccaaaccattccaaagtgtccaggtgatatgaatattcccaaagtctagagttgtaaaaccgcctaatgttacctaattaaaagcgaagcatctacctataatcgtactagtggtaccatgagtagagtgtccactagttggggttttgtttattctagggtgaacaaggtaataataacaataacaataataaggtcataacaaaggtaaataggcatggctaaataaaacagtgataacgcgggaatttaaataaagcgataatacaataagttaaatcaacataattttacaaactgggattcaatatgttcaaagatgatgtgacttgccttgctcgctttcccaaacaccggcttcaacttccacgaagagcggatcttccgaagctgcagcgtctacacgaccaacggaaaagaaaaggcttttactctactaaactccatataacaagcagaaacaaagcacaaaaatgggttcttgacttcttaaggaaaaattagagacttgaacggtccaattccgagttcaaatggccaagatatggccatttgaagtttatatgctctttaaatgaatatttgcgaatttcttcatttaaattttaatttaaaatcggatttattgcgtcagccgaggggaggggcgcgcggaccgggtccacgggagtggggcccacgcggcagcctcacggtccacggtggaccgggtgcacgcggcttgcgccggccggcgccgtgggtcccacgcgtcagccgcacccgagggcgcgggaggctgacggccgggccccacatggcagccgcggggcgcgcccgaaggcggcctcgccggcacggccgacgggaggcggcgcgcccgcgccccgatggtcgccggcggcgacctcgggcgcgacggagcggcacccgagagaggggagggaagggggaagcgaaatggcggtcctcggctcaccccgggtcgacggcgatgatgggaacggcgaccgaagcggagagaggcggcggcgcggctcgggtcgacgaggacggcggtgctccggcggtcggcgggcgaaacggaggagtggacaaggtcggcgagaacgcggcgaagccgaaggaggcgatgccgaagcgggaggaggtccggggcgacgacggcggcggaccgaagcttggcggcgacggcggagagagaggacgacggcgcgagctcgattccgacggggagagaaagcggcaagggtcggaaacggaggagggaggcacggggagtgcttaaataggggtgggagtgagagagggcggccggagaggaaggaaaccggcgcggcgatctcggctccatcaatgacgccggcgaggatttcgggagggattccaaacgaatccgagggagagagagagggaaaagtggggggaaagagggagggaatcacggggagtgatttccccctctttattgcgcgcgggggcggcgggatgcggcggaatccgcggcggcggcggcgctagggcacgggcgaggcggcgggcgcggcgcgaggtagcggatgacgggtgggccccacccgtcagcgagggtggcgggcgggcccgcccgtcagcggcgcgcgcgcggggaggaggctgatgggccgctggggagaggagagagagggagggagttgggccgagccggcccaagagaggaagggggggaaaggacttttagggatttttctttttataaaaccattttaactttgtttatttcttcttaattattatttgtgctctgaaaattccactaaaatttatttacgcattttaggcttttaggaaatatacaaaaatcctccaagcctttttcgacttttaactttgcacattttaattgttggaggctttcacatggattttacttattctatgcataattttgaggatgtattttagagtcgatttgggacgcgacaaacctaccccccttaaacggaatctcgaccccgagattcggaagaactggcgaagaggtcgggatgggctgccttcagctcgtcttcgcgctcccaggtagcttcttcctcggcgtggttgctccattggaccttgcaaaaacggattacccggttcctggtcctgcgctccatggtgtccaggatcttcactggcctctccacgtaggtcaagtcttcgcgaacttcaatttgctctgagtcggcctgctcggatggcactcgaaggcatttcttgagttgcgacacatggaacacatcatgcacgttgcccaaggaggcgggcagctccaactggtaagcgacttctccgcgtcgagcaacgatacggaaaggacccacataccgaggtgcgagcttcccctttgtctgaaacctgtgtacaccccgcaatggcgtgacccgaaggtacacaaaatcatccactgcgaattccaggtcacggcgacggttatctgcataacttttctgccgggactgtgccacctttagattatccctaatggttctgactttcgcttcagcttctctcaggatatcagtcccgaacacttggctttccccaacttggtcccacaggagcggtgtccggcatttgcgcccatacaacgcttcgtaaggtgccatttgtatgctggcttgataactgttattgtaggagaactcggcataggggagactcttatcccaggtcttcccgaaatctaggacacatgcgcgaagcatatcttctaggatctgatttagacgctcggtctgcccatctgtctgcgggtggtatgcggtgctgaagtttaatcgggtacccagctcttcttgaagcttcttccaaaagtgagaggtgaattggcttcccctatcagatacgattttcttaggaacgccatggagacttacgatcctagcgaagtagagttcggctagtttgttccctccataggtggtcttcacaggaatgaatcgacctaccttggttaatcgatccacaactacccatatagaatcatatccaccttgggtctttggaagtccggtgatgaaatccatcccaatttcatcccatttccattcaggtacttggagaggttggagaagtccggccggtcgttggtgctctgccttgacacgctggcacacatcacaaagggccacgaactctgcaatttcccgcttcatactaacccaccagtatttctccttcaagtctaggtacatcttcgtactgccagggtggatggaataaggactttcgtgagcttcctgaagtatcaactgtttaagttctctgttatctggaacgcatactcggtttccgttccatagggttccgtgttcatcctctgtgaaaccagcggctttaccctgtttcatattcttgaggagtccatgcaggtctggatcattcttctgagcctcgcggatttgatcgagcaaggtgggcttggcttccaacgtagccaagaatccgcgaccaactatgcttaggttcagggcttccatctgttgattaagttcgggtggaatgccacggacgttaagagtgttgcaatggctttttcgacttagagcgtcggcaaccacgttggccttaccaggatgatagtgaattcccacatcataatccttgatgagttctaaccatctcctttgccgaagattcaggtccgactgagtgaagatgtatttcaaactcttgtgatcagtatatatttcatagcgattcccaatgagatagtgccgccagatttttagagcatgaaccaccgcggctaactccaaatcatgggtagggtaattgccttcatgaggccgtagctggcgtgaggcataggccaccacatgaccgtcctgcatgagcacgcaccccaatccttggcgcgaagcatcacaatacaccatgaagtccttgtgagtatccggcaagattaacaccggcgaggaaaccagcttttctttgagagtttggaacgccttctcgcattgcgggctccacacaaatttctcttctttcttcaacaactgtgtcatgggtcgagcgattttggagaagttctcgataaacctccggtagtatcctgccaaacctaagaaactgcggacttgagtgacggtcttgggttgcttccaatcagtgacggcggtcactgtttcggggtccacagcaactcctttagcagatatcacgtgccctaagaattcgacttcggacaaccagaactcacacttgctaagtttggcatacaattgatgttcccgcaactttcccaacaccagacggagatggtgctgatggtcttcctctgattgtgagtatatcagaatgtcatcaatgaacaccataacaaatttatccaagtattccatgaacactttgttcattaagttcatgaagaaggcaggagcattggttaaaccgaatgacatcaccgtgaattcatacagtccgtatcgcgtagtgaatgcggtcttcggaatatcttcttcacgaatacgtaattggtgatatccggaacgaagatcaatcttggaaaatacagtggcacctttaagctgatcgaacagatcgtcaatccggggaagagggtacttgttttttatggtgacttcattgagagctctgtagtcaacgcacatcctcttcgtcttgtctttcttctccacaaaaatcacaggagcaccccagggggaagtactcggacgtatgtaccccttttctttcaactcttccaactgtttcttgacttcggccagttcatttgctgccatacggtagggtcgcttgtacagaggagtggttcctggagcaagatctatccggaactcaatctctcgcttgggcggcataccaggtagttcttccggaaacacgtctccgaactctctgacgatgggaatttctgacagttctatctgatgaagttctgaacttctgactgaggttgggggtgcaaagaaaacaaccggttgttccggccctcggtacagagtgacagtgcgtctcgcgcaatccactactccttggaattgagccaaccaattcatcccaaggatcacatccatgttcttggtgtctagcagaatcagatccgagggaaaaggaatcccctgaatttctatagggacggcagggctataatactttgctgtcataacccctccaggggtggtgatgagcaaagggtttctaagcctttctacccccaactgatttctccccacgaatggcacagatataaacgagtgggaagctccagagtcgaacaaaatgatagcagggatggaatggatgaggaacgtaccaacgatgacgtctggagttgtcagcacgtcctcggccgtcacatggttcacacgaccccgaatgacgtccttaccaccgttgttggggcggggaggcgcttggccttgctgacgccttggcttcgggtatttatccgcaaagtgcccgggcttgaagcagttgaagcacagacgctgcggaccttgagcgtccctgcggccttgaccaggttgcatagttggcgtaggaggacggggcgcacgagtcccttgttgattctgctgctgctgcggctgtgggacgcgcaccacgaattgaggtcgaggcgcggagcgaggttgctgctgctgttgttgctgctgcgaggaggatccccctggatagggattggtgtagcggaccctttggttagcaccccgttggttgcggaaatttgccaagcggcgcttgtgcgactccagttccttgtgcttggcttccaagcggatgctcttgtccaccagacgttggaaatccggataatccccggagactagacggacggacagctcagggtccattcctgccaggaacttctcttgcttctcctcatcttcccgcacatcctccggagcgtaacgggccaggttgttgaactcgtgcaaatactccatcacgaagcggttgccttgcttcaactctcggaattcccttttcttaagggccacgactccggcgggcacatgggttcttcggaaagcggcggtgaagcgagcccatgtaataggctgtccctctggctgcgtagcctggaaatggtcccaccatagagatgcgggtccctgcagctggtgggcggcgaagatgactttctcctcatcgctgcactgcacagtgtctagctttttccccacggcatgcaaccaatccaacgcatccacggggttgttggagctagagaaggtaggtgggcggatgcggagaaactcggcgagtttagagtgttgtgggggtggtggtggagcattaagttgtggcggattttggaggtggtggaggaaagcagtcatcatgttggcctgctgggcgaggatttgggtgagaatggcgttggtgtctggtagtggtggtggaggcggaggaggaggtggaggtgggttgccctgatggttgtggttgctgccttcaggttggttgccatcacctgtgttagcacttctcctggtcatcaccatctgaaaaccccacacagaaccagcaaacagagagagctgacaattaaagctaaccacccacgactaccataattcttgaatttattactgctattaaattggttcattaaagttcaagttgcttaggcaaataaaataaagacaggctccgacacagttacaccacacaccggcataaccgtgccccacacaacccaacaagaagacaaacgagaaaaaaaacacacgcgcaagcctactaactgctcgtctaccgctgcgacgggccaggacggaaggtgagcaacagcgcatcctccgtgctaccaacgccggaggcttccccctcctggggaaccacgggcgcgggctcggcacaaggggtctcgatgaagcaggtccacgccagggactgacgaacaagctcgggcctggaggtgctcttgcgggcggtgatcttctgactgcggcagacacggcggcgcttggggcggcagatctctccctgggcgatcttgagctggtgcagctgcgcctccactgcgtccaggtccttcttgagctgcaggttctcctgacgcagctccaggatcttcaagttgttctcgaccatcccacggcgcaccatatgatggaagtcgatacgagccgcgtcgtacgcctccaccatgcgcgccaagtgcacgatggtagcgtcatcctccgagctagcatcccggaaggtggcgtggtcgcgggctcctccgcgacgagggtggtagcggtagggcgagtgctgcaactcgtccgggtagcgctggtgaagagtgccgatggcgaggagagcggcgctctggcaggcggcggggaaagagtctccacccgcggtgactgtcagcgaagtccgctcgggagagccagcgaggatcactgcagtgacctcccaagcagcgtggggctctgcgtcgtccccctcctgctccggaagcggcctggcctggtagtccactccatgtggataccccaggaccacgcacatgccccgcagctccaagacgaaaccagtcatgtccaaaccacgacgggtgacgctgccggccatctacaaacaaaaacaaaaagaaaagcaacattttaaaggccagattttggcgataaatgaagcagcaagacagagagagactagaggattttcacaaatacaaaggatttttatttcgaaaatattgctaaggcttgggatctacggctcgtcctagggtcaagggggctctgataccaacttgtcacgaccggaaataacccaacaggcattccttacgtgcgtgcattaatccttgtcccaggagacaaggtacaccaaaagttgatacaattcagagtataacaagcggaagcgtaaatagttaatttattacctgggcagcgaaggcccagcacactcagagacaaacgagaaacagcggaagactagggcgacgaccacaggcacttgacggcaggcacgagctagacaccgaagccttcatcctccaggaactcctcttctgggtttgggaaaaattgagcaagactgagtacaaccaccgtactcaacaagacacacccacaagtgcagaataaatgcaagggagtacaaaggagttataccataaaggggttagggttgcaataaacagcatttaaagacatttagttgctcagggctattttgtaaacacgattctagaactaaacaatattaattatcaaggccgtgaacccacacgaacctgccttaacccaaggcctacgatgattcagaccgaactggcaacccgaccctgggtcccagctcgtcccaagccaacccaggccaaccattccatattttagttgttaagcaagttttaagaattaaaacactaacttgggtacattgctcggcttgcccataaccgagggcgcggctattcgaataggttttactctgatcagaggtgtacatctttacccacaagacacatcttcctcacgtgtaaccacgtgccacataccaccacggtatacagacggaagacgtgacatagtttccaacccatcctagccatagacaagagtaccgacccaatcccacctacggccggaacccccgggacaggcaggcaggactgagcccctagcagcaggacaccggccctgtgccatgacatctcgactaccgggccgcagctcgtgtagccttcatttgccctggagaatgtccatcgacccccgacttcatccacctccatccgtgtacttttgtttataactagactgagccacaaactaagccttacccactagacatgtggaagtacggtagtgctttgcaacagaggcccgaagactggtccttatatggccgaggtgctaccatcaaaaccatgcaccccgagcccagcctaaaaccattttggggattttgaatagagggggcggtgtgaatccaattccacaataaccaaaccattccaaagtgtccaggtgatatgaatattcccaaagtctagagttgtaaaaccgcctaatgttacctaattaaaagcgaagcatctacctataatcgtactagtggtaccatgagtagagtgtccactagttggggttttgtttattctagggtgaacaaggtaataataacaataacaataataaggtcataacaaaggtaaataggcatggctaaataaaacagtgataacgcgggaatttaaataaagcgataatgcaataagttaaatcaacataattttacaaactgggattcaatatgttcaaagatgatgtgacttgccttgctcgctttcccaaacaccggcttcaacttccacgaagagcggatcttccgaagctgcagcgtctacacgaccaacggaaaagaaaaggcttttactctactaaactccatataacaagcagaaacaaagcacaaaaatgggttcttgacttcttaaggaaaaattagagacttgaacggtccaattccgagttcaaatggccaagatatggccatttgaagtttatatgctctttaaatgaatatttgcgaatttcttcatttaaattttaatttaaaatcggatttattgcgtcagccgaggggaggggcgcgcggaccggatccacgggagtggggcccacgcggcagcctcacggtccacggtggaccgggtgcacgcggcttgcgccggccggcgccgtgggtcccacgcgtcagccgcacccgagggcgcgggaggctgacggccgggccccacatggcagccgcggggcgcgcccgaaggcggcctcgccggcacggccgacgggaggcggcgcgcccgcgccccgatggtcgccggcggcgacctccggcgcgacggagcggcacccgagagaggggagggaagggggaagcgaaatggcggtcctcggctcaccccgggtcgacggcgatgacgggaacggcgaccgaagcggagagaggcggcggcgcggctcgggtcgacgaggacggcggtgctccggcggtcggcgggcgaaacggaggagtggacaaggtcggcgagaacgcggcgaagccgaaggaggcgatgccgaagcgggaggaggtccggggcgaggacggcggcggaccgaagctcggcggcgacggcggagagagaggacgacggcgcgagctcgattccgacggggagagaaagcggcaagggtcggaaacggaggagggaggcacggggagtgcttaaataggggtgggagtgagagagggcggccggagaggaaggaaaccggcgcggcgatctcggctccatcaatgacgccggcgaggatttcgggagggattccaaacgaatccgagggagagagagagggaaaagtggggggaaagagggagggaatcacggggagtgatttccccctctttattgcgcgcgggggcggcgggatgcggcggaatccgcggcggcggcggcgctagggcacgggcgaggcggcgggcgcggcgcgaggtagcggatgacgggtgggccccacccgtcagcgagggtggcgggcgggcccgcccgtcagcggcgcgcgcgcggggaggaggccgatgggccgcgggggagaggagagagagggagggagttgggccgagccggcccaagagaggaagggggggaaaggacttttagggatttttctttttataaaaccattttaactttgtttatttcttcttaattattatttgtgctctgaaaattccactaaaatttatttacgcattttaggcttttaggaaatatacaaaaatcctccaagcctttttcgacttttaactttgcacattttaattgttggaggctttcacatggattttacttattctatgcataattttgaggatgtattttagagtcgatttgggacgcgacacggatgatcttggtcagatgttgcaggacgccagggaggactgcaaaagtgaaaaggaggcccataaattggacaagatgttggaggaccacagaacttcgttgtacccaggttgcgagcaggggcacaaaaagttggataccactctggagttgttgcaatggaaggcaaaaaatggggttagtgacaaggcatttggcgatttattgaaactcgtcaagaacattcttccggggggaaacaaattgcccgagacaacgtacgaggctaagaagatagtctgcccgttaggactggaagttcataagattcacgcatgtccgaacgattgtatcctatatcgcggtgaggagtatgagaacctagaagcatgccctgtttgcaaagcactacgatacaagattagacgggacgatccaggagaagttgacgggcagctaacaaagaagagaattcctgctaaggtgatgtggtatttccctataataccacggctaaggcgtttgttcaggaacaaggggaatgctagaatgttgcgatggcacgctgaagagcgtcaacaggacgggatgctgagacaccccgccgatggttcacagtggcgaaacatcgacagaaaatttaaagaatttggaaaggacacacgaaacatacggtttggtttgagtacggatggcatgaatccttttggagagatgagtagcggccatagcacttggcccgttacgatgtgtatctacaacctcccccctggctatgcatgaagaggaagtacataatgatgccgattattattcaaggccccaagcaacctggtaacgacatcgacgtgtacctaagaccactggtcgaagatcttaaacagttgtggaagaaggaaggtgtccccgtgtgggacgaggacaaacaggaggagtttaacctacgagcgctgctgttcgtaaccatcaacgattggcctgcacttagcaacctatccggacagtccaacaaggggtacaaggcttgcactcactgtatggatgaaacagaaagtacgtatcttaagcactgtaggaaggttgtatacatgggtcatcgtcgattccttgcagcaaaccacccggtacggaagaaaggcaagcacttcgaacataaggccgaccaccgtacgaagcctaaacatcgcagcgggaaaacagtgtttgctatggttaaagatcttaaagtagtgttcggaaaggggcctggaagccagcatatagagagcgaagatggtcacgtggcgatgtggaaaaagaactctatattttgggagttaccatattgggaattcttggacgtacgccacgcaatcgatgtgatgcacctcactaagaacctttgcgtaaaccttcttggcttcctaggtgtatacggaaagtcgaaagatacaatggaagcacgtaatgatctgaagcatatggaacaacgcgacgaccttcacccggaaccaaaggagaaaggaagccattacttgagtccagctagctacactcttagcaaggcagagaaggaaagtatgtttgaatgcttggagagcataaagggaccgtctggatactccacgaatatcaagcgaataataaccacgaaggagaagaagttcacaaacctaaagtctcatgactgtcacgtgttgatgacacaactgctaccagttgtaataaggggtatccttccagacaatgtccgggcaacaataacaaagctatgtgcattcatgaacgcaatttcgcagaaggtcatcgatccggatagattagaagcccttcagaatgaagtggtgcaatgtctcgtcagttttgagttgatattttcactttcattttttaatataatgacgcatctgctttgtcaccttgtgaaagagatccgtattctcgggcctatgtacctacacaacatgtttcctttcgagaggtacatgggtgttctgaagaagtatgtttgtaaccgtgctcgtccagaggcaagcatcgctaagggttatggaacagaggaggtcatcgaattttgcgtagaatttatcgaagaccttcgcccaatcggggtacctgaatcacgccatgaagggagactacggggaaagggaactctcggaaggaaagcaataacgacggtagacaacaatttattccgtaaagcccatttcactgttctgcaacactcttcattggtagctccttacatcgaggagcacttggctctaggtcgcgccaggaacatcggtaagtccgatgcatggattacacggcatcacattgatactttccccgcgtggctacgacaacatctcatgggtaacgagtcgatcaaccaacaacttgccttcctggcgaggggaccgtctgggtcgatcgcgacattccagggatatgagatcaatgggtacacattctacacgagagcccaagacatgaagagcacgaaccaaaacagcgctgttcgtgtcgatgccatgggacacgatggaacaactgccacgtattacggtgccatcgaggacatatgggaacttgactatggtcctctcaaggttcctctgttccggtgccaatgggttaggttgactggtggaggcataatgattgatgacagtgggatgacaactgttgaccttaacaaggttggatactcggacgaaccttttatccttgccaatgatgtaacgcaagtctttttcgtgaaggacatgtctagcaaaggaaagaagggcagagggcctgatgagcctaagcgtcaagtggttctcccaggcaaaagaaaaatcgtcggagttgaggacaagactgacgaggattacgatcagttggatgggcaaccccctttcacggtgacgattgaccctagcatcctcctatcaaatgaagacaccccttactcaagcagcgatcacaaggagggaacaatagtgaggagaaagtacgtgccgtaattattgtgtacacgatgtaaactattttggatgtattgattatccatataaatcaattgatgtatggcatatgttaattacgcacgattattagaggtttcaacaagtttaaatcatgtatatgctagttatatgtgatacttacaatttttaaaagttttaaatcacacaggtggcaatttcatatatatgttaattagagtttttaacatttaatttactagcattcatatgctaattataattgactagaggatttttaaaagttttaaatcacgcaagtggcaatttcatatgttaattagagtttttaacatttaatttactatcattcatatgctaattataattgactggagaatttttaaaagtattaaatttaatatatttttaaaactatcattcatatattagagtttttcacaatttaatttactatctttcatatgctacttatatatgactattcgaatttttaaaaggtttaaatcatgcatgtggcatttacatatgttaattagagtttttagcatttaatttaatataattcctacgctaagtacatatgatgattacaatttttattaattttaaatcatgcagtatgtacatacatatcttaattagagtttttaccaatataataatatcattcatatatatgctaagtatatatgattattggaatttttattaattatatttgcttattacgatttatccacttaatttattacagacaaaaataatttttcgaagtaattgtcattaatctttgtactttaaataatgttaatgcattaacttctattttataaacacatatgtaagcgaaaatcatatgcagtgctataatctttagtcccggttcttaaccctaaccgggtttaaaaagaatttcgaaatagcgggaaaagatatttactcccggttgttgagaacaaccgggactaattatttagtcccggttgttctcaacaaccgggagtaaagatcttttctttactcccggttgttctcaacaaccgggactaaagatatctttagtcccggttgttctcaacaaccgggaataaagatccgggggtatatatattcccggtgcgccctcgtcttcttcaccaacacttagacgttttcgaccgatcgatctctctcggcctctctccttcgccgccactgcctagggcaaatccccgcgccgacgccgccttatctcgccgtcgtctcgagctcgtcatcctcgccgccgcctccgcctcctccgctgccgccgcatctctggggtgagagccgccgccgccagatctcccttcatgcatctcgatctctccgatctcgatctctctccgtcgcgccgcccgccacgagacgccgcgccatgacgacgacgcgccacgccgccgccttcgccgccgcgcaacgccgccgccgcatgccaacgccacgccgccgccgccgtcgccacgccgccgccgtcgccacgccgccgccgccttcgccgccgcgcgcgcaatgccgccgccgccacgccacgccgccgccgccacggccccgcaacgccacgccgccgccgccgtcgccacgccgccgccgccgccgccacgccgccgcgccaaccgccgccccgatgccgccacaccgccgttaacgaacgagaacgagaatgatcgaacgaacgagagcgagaacgaacacgtcaacgtacgttgccgcgagaacgtgaacgagaacgagaacgatcgaacgaacgagagcgagaacgaacacgtcaacgtacgttgccgcgagaacgtgaacgagaacgagaacgatcgaacgaacgagagcgagaacgagaacgatcgaacgaagacaagcgagaacgagggaacgaacgtgaatgagaacaagcgaacgaacgtgaatgagaacgagcgaacgaacgtgaacgagctagggaacgtgaacgagcgaacgaacgaggacgaacgttaacgtgaaatgcaatatatatatatatatatatatatatatatatatatatatatatatatatatatatatatatatatatatatatatatatatgttacttcgcatttatcctaatacatctttttgtatcttgcagaaaagacgtgttgtcggagtcgtccgtcaagcctgagtggaagagctagccctagaaggaattggagcaggcaagtgacgtaataatataaatgattgttatatttgtaatgcaattaattaagattattagacctgtaattagacttatcatataagattgtgtagtgttctaatattatttgagttttaatataagattattttattgcaaattagacttagtatgacattattgactacggaattggtgcgactcctagcaattgactattgtagtcttaattagacttagcatatacgcacgaaacacttagcatacatgactattttagtcttagcatgtaatattatttgagttttaatataagattactttatttgtaattagacttagtatgtaattattgactacggaattggtgcgacaagtagcaattgactattgtagtcttaattagacttagcatatacgcacgaaacacttagcatatacatgactattttagtcttagcatgtaatattatttgagttttaatataagattattttatttgtaattagacttagtatataattatttactagctagggttgtataatatacgtcacctagacttagcttatatcacgatttgtaattagacttagcacgtaaggttgtgtagggttctaatgtacgacatttacacttagcatacatgacttagattgttaaaacataaatgtctcgtgacttagcagatgtttcttgtatcaacagatggctgaccgcgatgaggaacagatattgtacgatacaatcgcggagggaagcagccagtattggaatgaagaagaggggaacgaggatccaaaccagtacttgaacgaggaagggaacgtggagagggatgcggaggggaaccagcaggggcacgtggaaagggatgtggaggggaaccaggaggaggaggatagtggtagtcaaccctccgttggacagaagagggcacgcgggcaacgaggtgcagcgaagaagcttgagggtcggcacatcataacggaagtggaagaagatggacgtcctagtgccccggccgaagccgccaagaactatgtacgtcatagcggttgggttgtgcgggataacgtgcctgtcagtacggtgtactggcgaagaacaagggcacacggagatcatgagagctttgtcccagattcggagaaagagatgctgtggaccacaatgctcgagacattcacccttcctgcgggtacagaggacaaagtgaaaaggtggactctgaagaaaatggcagaacagtttcagagcttcaagggagatctgtaccagaagtatatactgaaggggcagacactgaacttcgacacattcccaaagctaagggatcactgggacgagttcgttgcatataagacaggtgaacaagggtaggcgatgatggaaagaaacaaagaaaatgccgccaagaagaagtaccatcaccacttggggtcaggaggctatagcgtcgcgatgccgaagtgggagcagatggaggctagcttgattgagaggggtatcgaaccggcaacagccaattggccggaacgatcgaagttctggtactatgctcacggtggaacgctcaacccagctgatggctcactggtcttcggcgatcagatacgagaggctgcgcgacgactaacagatgcagtggaagcctcctctcaaggcatgttccaaccagacagagatagggacgagctgacactcgccctgcagactccagagcatccaggacgaacacgagggaaaggggtgattccttggaagattggtttcaaggaggacatccacacgtacaggagtcggatgaggagcaagagagataccgaggcgaagattgcagacctagagttccgggtatcgaggtacgaactcaacatgcaagaggaggtggcaaggaaggttgatgaacgcatggccgcacatcggtcccatgatccccagccgaccattcctcctgcaatggtgagcccgtcaggaaaccgtagcagctgcgcctcaacggggcaggtaggatcacagagcatggacgccatgcaaacacaggacgaatcgacctgtcccgttgatgacatcactcagcggacaccatgtgagctgcatattcctttcaagaacttatcaataaaggtaagatttagccatttcgctagttgctgcttatatatgttgattactaataaataatctctcacaacatgaaggtggcgtcgggcatggccatcccaacggacccttcaggtacttaccactacaggctgattccagcaggatactcgaaggtcgaaattgagttggtcgaaggcgcgtacgaggacctcgagctggattaccctggaggagatggtgagacgcatctacgagacacatgccatgccattattctatggcgcaggcggtacatcatcctccctaggcgacaagcggcgtctcgtgcaccatctcctccggctccgccatctcctcctcagcatcctgcaccgtctcctcctcatgctccgccagcaccgtctccacctcaggctccagcatcgactcctcctcaggatcctgcaccgactcctcctcgtgctcctacacctactcccccgcaagctcctcttccggcaccttcaaagtcaagggccccccagctccaccgcctgcccacacaagggcaacgaagaaggcgaaagttgacgtcgccaagaacaaggacccggggtacgattgcacgcaagaggagcttgacgcttacgttgcatcagaagtcaagagacaattcaagcctcgaagtccagaaaagaagattcctatagaccccagtgtcaggaacttcttcaggggtatgtctgcatctgtcaaggaggccatcaagctatcggactatgagcgaacgctgaagaaagcatcttctggaaagtccaaaccagtccctcagcttggagagcaaccaaaccaggagatcgagccgttggtgaccggtaaagaaatgacgatagaacaatttattactgacaccggtctaactacggatcaattgctaggagtcgcaccaatcgaaaaggcggaagtgaaatacatgtacgaacttggtaaaccgcttgtcaagcctgagctgctgcagtccctacccacacaaatgtacaagttccatcagctgtacatggagatgagcgccaccggtagagagatgatcggagcgaggatcagggacacggacttcttgcaaggagatgacattctctggatcaatttcaggggaatctacgaactataccagctggacgccctcgacgtctctattatgagttgctggattttgtaagtatatcgttcagttagatttcttactatacgtctcctttaattaattaggtccttgtatataagtagactatagaaaataatatactcccttttatcgttgtagaatggagattcaaagggcccgacggcggagggttttcgatactggattcatcgaccctcggaaagtaaacgtcgcaatgctcgaccaatatccacaagaaacagaggacaatctcgtccatctcctgaaggcgcagcattacaagacgttcatactgttgccatacaacacagagttagtttaattttactgtcttcctacataccaaatttcattcccgtacgaacttgctaagtgtttcatatgtaatgcatcccacgcacattgcagattccactgggtgcttttactcttcgacctggaggcctgcaccgtcaacgtatatgactcaatggataaaaaagagtctacgtttgacaaggttttcgaacttatagacaggtaccgtcataagttcctttgttaattaagaaaatcttgttatgttaattgctactacgaatcatagctttaaactccatgtagggcttggtatcggttccgtcatttggtccgcggcaaatggagagaaagacttaggcggaagttcaaatttcctgtgagtacacatgctctacatttatatttctccgattcaaatacatacaagtgtatattaattagatctctcgttgtttgtcatttatttgtagtgcgcaaagcaaaagcagggaactaacttgtgcggctattacgtgtgcgagtattgccactgccttgcagaccaaatcatcaccacaagagagctcgatgtacgtacaaataaattcaaaatttcattacgtagcgatttcttgtttaattactaatcaatttcatacattcatatagtttattcgcatgagggataacctgaccacacacaaggaatttatcgcggcagttcaagaacaactcatgggattcatcaacgaagaaatccttgatcccaagggtgaattctactacgacggaaacacaattcaccggtccttagcttctaagctagcagcaagtactactacgtcgaaatcgtagctagctaggacatataatggattgtaattaatacatgactacatatgtttctatatgcatgtgtacacattttctataatgtaaatatattttggtcatatatatatctatatacatatgcatttgcataacatatatatatatgtataaatacatatatattatgcatgtatatacatataatataatataatatatatatatacatatatatatatatatatgtatgcatatatatgtattgaaacatatatgcatggtttatatatatatatatatatatatatatatatatatatatatatatatatatatatatatatatatatatatatatatataaaccatgcagcaacagggccatgaaaaaaaaaaggtcagctcgatctttagtcccggttggtagatggctcagccggccacgtggctgagccatctttagtcccggttggtgttaccaaccgggactaaagatagatctttactcccggttatttcacccgggactaaagatagcgatctttagtcccggattggtactcccggtttggaaaccgggactaaaggggggttacgaaccgggactacaaagggtttctccaccagtgacatgagcgtcatgtgcaacataaaacccttacgaaaaccaaaactttaataaacaaattgttttcaactgctgggtgacacggatggaatttgggtggttctatgaaatggttagccgctgaccctgattagttaagaatcgagtaaagaaatgcatggactattgattcaatgagttgtgtgtgcatgaacttgtagtttgtatttatatttgttgtagtagttagctctttttttttccttgtgcccataagagttcctcatgtcattttttttcttataattaaaatatttttgcaaggttcctttccgcattcaaatatcctcccatttcatataaatggttctaaatagaaacacatattaattaatgtaacccaactaggaaatcacttccaactctaagtacatgggaccaaggtcaattgagcatgcattgctgaccttcggcgaagtttctgtatgtatggcacaaatgcatgcagctagttggtgcgctttgaaagcaccttcattaacaactatgtttctttcctgcaaaaaagaaaaaaaaatccattttcttttccttaacctaaattcccattctaattttatggagactacagatgggcacattatggatttgaaccaactaattaatacatgtgcaaaatgctgaagatagcgcaaattaggggtgaaaatggtacggaaacggacggaaaccatctttatcgttttcattttcatatttttttcggaatcggaattggaatcggaaaccccagatacgaaaacggaatcgaatattatcaaaactgaaaacggagcgaaaatgaaccggcgcgaatacggtaacgaaaatttatcggaataaaaaactcctcaaactgataaatccaattgaataaattatctatgtttaaaagagtaaagttgttgataaatcccaatgtaggacaaaaaatattcttatgtaattttagatttgcataacaaatattttttaaaaaatataacgccaaacaccatggtattcactatttagtgcttaaaaaaatccagggtatttcagtcacaaaatttcttgtaattccgagaaaatttccggaaattccgagaaaatttccggaaagtttccgaccggttccgagttccgacggaaactgcccttatcatttccgattctatttccgagaaaatatttccgaattcgtttccatttccgaaaaattccgaaaaaattccgactgacagattccgttttcgaaaataggtccggaatccagaaagtttccgtaccgttttcacccctagcgcaaatgctgaggcaaatcatgaaattgagattaattaatgcattgagatgatttccgcaacgacagcacaatctatgtaacgctaaattaattaatcctttcaaatacaggttatatatgattttagcctcgtgaaatcatgaatttcaattattacaagtgcaaatgctgaatcaattcttcactaagccagcaaatttgccggttgttgattggtccacatggcgcgtcaacggttaaggtaaattcggaattaataaggataaaaaatgctaggatatgtaaaagtatctagatatatgccgtattatgtgcatgaactgaaggatcactagatctcaatcgggcggcaaccctcatctcaatcgggcacggcgttcgtcacaacctagaagtcacagatgtgaaaagttatctcaatcgggcaaatgaccgtcacggataaagctatctcaatcgggccttaattaaagcccgtcactgatagttttcacccagacgaccagtcaaactatagcccgtcacagatgacctatcttaatcgggccacaactagcacccgtcacagatgacccttatctcaatcgagcataagttaatgcccgtcacagatgagtataattaaaaaaaataaattttaatttttggctagcctcaggcctttgctatgccatccgacgcttaacatcaaagttctttagagatcagcttccggaaaagcaattgtaacttgttggtatgagtattctattaatcctattaagccctatgccaggatgtcacaccccaacatcccccattcatatacattcattcacatacacaaacatcaatatatttaacacaaccactttcacataacatccattttgatcacatatttcatatccattcacatatttcagtagcaaaaatgagttaattggatcaaatatatatttagcaagtattatcatgaagaggaggcaaattagacttctagaaaaaataaattttgaattgaattttataatacaaaataaactcatatgaaaaagctgtcaaaaacaaaattgtagaacttattgagatctatcaaaaataaagcccgtcatagatgagaactttaaatttaattttaggccgatttttgtgtgtcaaatgcaaaaattgtataactcatcgagatctacaattattgtattggtcctttgtacaaataagttcatttgaacaatttaaattttgaattttcaaaatttgacaacttcgaacaaaaattggggttaataaatgatttcaaatggaaaagtcaccaaaaccaaaattgtagaactcatagaggtgcaaaatttttattttggtaatttctccatctaactctatttaaacatattgaaatttgaaattcaaagtttgagaaattcaaattgaattttagatcagtgaacgacttcaattgaaaaagtcatcaacaacaaaattgtataactcatcaagatatataacttttattttggtcatttttctatataacattttttgaaccgtttgaatttaaatttgaaaatatgataacttcaaacaacattttcaaatactaaatgatttcaactaaaaaagttaacaacaacaaagttgaataacttttattttagtcatttcttcatccgacaaagtgatagtaacattgttcacaaaattgatatatatcttatctggttttataaactataacacatatatgtacaatttgtgaacaatgttactaatattttgtcagatgaagaaataacaaaaaaaagttttagatcttgatgagttatactattttgttgttgatgactttttcaattgaaatcatttagtatttgaaaatattgtttgaagttgtcatattttcaaattcaaattcaaaatgttcaaaaaatgttatatagaaaaatgaccaaactaaaagttgtaaatcttgataagttatacaaccttgttgttgacaatttttccatttgaaatcatttactacccgtaaaattattttgactcataaaatgaattattatactgcagttaattattttgctatagttctacttacaaaaaaaacatttcatataaaaaatagaaaaatactcatcggtgatggattttagttaatgcccgatagagattaagtcatctcaatcgggcattagcatatagcccgtcactaatgagtcatctgtgacgggcctagttgttatctcaatcgggcctcaagttggtacacgtcacggatgatggtcatctgtgacggccccaacttcaggcctgtttgagatatggaatgttatctcaatcgggcctaaagttggtgcccgtcacgaatgatggttatctgtgacgggccccaacttcaggctcgtttgagatatggaatgttatcttaatcgggcctaaactacggcccgtcactgattggtgtcattcgtgacgtgcttaagtttatgcccatctaacatgtctgtgcgaccatatctcaatcgggtactttttcggcccgattgagatgacttccttatgacggcccgctatttctaggtatgttagaggccgtcacagataaaaagatctgtactagtggatctagatagatccagtcatgtgtgtgaagttaaaagcaaaaggtaatccaatctagatcaacggggtctcagcttttagtatctgccccctctttgtaacacacacagacatcaactaatctcaagctagcattggaccacatggtgctgttaaatagtactgagataaaccaaacatttactgatgggaaaatactattatggtggtatctcgacgtttggaccaggtggcacaggagttttttttacccaggagcatgggtggcggtctagtctacggattgatagccactaagatatacggttgtatctcgacagtcggaccaggtggtacagaagttttttacccaggagcatgggtggcggtctagcctacagattgatagccactaagatatatatatatatatatatatatatatatatatatatatatatatatatatatatatatatatatatatatatatgtttctgtcaaacttttgtgcttaggagatgttctagttgtttctttttcttttttggctgtgtgcattttatgcagaggccgggggtgactcagtttgattatatcatcttgatgtaattaactgagtctaaataaagcttccattatctaaaaaactgatgggaaaaaaagaaacactcacatgtgtaggaccagaaacaggagagagaaggctaagatgtgagaaatctagaaccttctcaaatataaactaaaatggagaaagccagagctttcaaaaatttgaactactaccttattctccttcggccactccaatacagaaaccagtaacaaaaattcaccgggtaaatttatataaaaaaaaatcacatggcaacttaaaagaaaaaaggaaaatttgatggtaaacacatagggggccatatagcggcgtgccaacaggcgcgctacttttcttgtataatatgcaatattgtttacaaattattaagaagttttttcttccagtgtatacagaagaaaaccctaaaaccttataagtgtatagatgaaattttccctattagaaatacgaaaattaaaagtaattgtgatgaatgccacaatcagagatttaactagttgccacttttaccagatccgtgtaatccctctcacaaagtgataaatctattgccacacacctcgctggagtggcaaaacttcaattggccactaggagtggttaatgattacacattttatctcattgtttggtcacgaggtttgaatacagcaactggagagaatttgagcttttaactggcatacctcttatataaaaaattatgcagtgccgttttttttttcatttatgtatatgtattgggccaaatgatgatgtatttcacatcttgttaaagctatttgacataatatatattcgaatataaacatatattcatgttaaaaagtatatatgggccatccttttaatatgatgcataccttgggccaaatgatgctaaaccatgcattaaatatctgctatcctagatatgtcacgtattaagtactcctcaaaagatatatttatttattatatattttaatgtatgcgttacttattgaaaattgttcaatattacctcactttcgttttaccaatgaaaattccaaaggacctgtttgaaatacagtactacttcgaaccagaattgatttttttttattattgttggaattcttaaaatcaagtgagggcctaaatgaagagccaaagtataatcaactatttatgattgcagcaaaatctccaaactttgttttgtcctgtaaagtttcttgaggccaagataacactacacaaaccaccaataaacacctcatggaacaatagcatgaaggtcttttacaggacataaacactagcacatatttccatatttggctaccaagacccatacccacactgtgcatacaaagatatgccacagaagatctctcacatagacaaccacagcacaccatagaacaagcaacatagggagagaggaaaaggaaaaaaaaaaagaggagaaaaggagccaggtggagaagaggtcaaagacaagagacatggagcaaaggcataaacccacacacccacccctctcttcacccatcccccaaattccaaacccttgcaacttcagatcttgctctcttactaccgtgccgcctgccggagacttgattccagctatgcggctccgaagagctgctaccagggtgcttcggccggcctactccaccacccaggctggagggccacgtacatcttccagcaacctctcgtcggagctagtgatgtatgtgcttcgtatgcatggtggcggcagaggtctcaacaaccctgtggttgatctagagggtgcatgcagcctgaaccaatcaccttgggatctcgcatgcgagcttgagaaccccaatcccttggtgagcttccatccccatctccccctaccatccctttcacatgctctccctctactaataatttcttctaggctagcataaatgctcgatgcaagttacctatcttgcttgattcgttcctcttggaatttgggggttgacaaccatttttctcactctcggatgttttttaggtttcatccatgtgagagatgtagaatcatgaagttttggtttgagtggttgcttagtggcaagtagcaacaacaaaattagttagatcgaggaacaacaaaaattagacacattgattggcgggatcatgctttcttgtaggctcttcaggcttctttccctgaagatttggccatcacaggaaaactagtgttgagggattttggaaatgaatgcaacaactagatctggatatctaagagttatttgattgctccgtggcttgttgcttgccccttgttgagtgttggtcagttgatgtggttgaaaatttttgtggtttcttgtgtactttagaccatgcacgcatcacatatgatcagtttatattgctttattaaactcaccatgctggttatcttcatgtttaccagctagcttcaaccttggtctttgatgctatcacatagtgagcaagatactatgcacaattgtgctacacttggaatttgtagccaaaggttctttcattttgcttttgatggcatagtgtacattgaattaattgaaaatatgtgtgatttcatttatccagtaagttagctggtcaccttactagagtaattcaggatttgtcccatcactctatcttttcctttttaagcaacaaaaacatttctgttgtgtattgctaatagatgccagggatgtaaaacatttccattatctaaaaaaattactttatttgttctgtatctcacctcgactgtactattcgaaacttgtaggaggacctgttcaacaagtatctagtgcacatccctcatagggctagtttcacattcaacaacgataatgatgaagagatggaagtatatgacatgatatggaaacaacagcagggtgaggaaatgaaggatctgaacccatcccaaaaggagaaacaagatggtgagaccaaaatggtaaaggatcatatgaatgtggaacccctggtgccagaggaggacatgttagacaaggggatagaagattttggcgaaaagaaggctagtgtttggtactatcgcaagaggtggcactgccaaaacatcgtcgatgggcccaaggccttgtgtgaataccacctagcaaagagccactccaacacccctactagtgtgaaagttgcaaccgcccattctaagtcatgctgtacaattaccatgtctcatctcctgaaatctagcttcaaaccaactttaactggtgaagcatcaagtttgagggcagcatcagcaagcatacaaaagaactcccagtcacacaagaggaaggcaggcaatggcttaagtgaggatacatactactcctatagtttgttcagcccattccatggaaaggatcaggatgatagcagaataggttgagtagctacaattgattatcaacagaaggggtttctacaacaagataacattgtcctcataaaagaaagagatgataataaggaatacatcgatgttgacaacttgtttgatgatttctcgatcgcaggtgatgatgggcaaagcgacaaagactactttgttggtggtgccaataatccccatgttaagaaagggaaacaatagatggcagaggatagagcagaatgatggctaagaagcacattaatgaatggtctctcaaataattgctctagagtttccattaaacgatggaagtgtttcgatctccccttgttgtttgatttatgtattatgtatggattgtggcatgtcccttttctgtgaacattttaattttgctatatttgtaagtggatcaaatataatttcgggtgattaaggaatgtttcctatccaaaaagaattccgcaaaactttggataattgattataaaatgagacaaacctggaatacaagatatcaccgaagactaacaagtgtcatggtcagatagtaaggaatgtttgcatcagcttatgtaacaacccgtcctccagaattgcgtagcccaatccataagatgggtagactcacttacaagttcatccttgtttcttgtaaatgggttaagacagtagtggtatggttgaaggaacaaagccttataagttggacccactctaatcaacttgtagggtggtaataaggtggtttcggcggagagcaccaggtcgcaggcagccgccgactggcccggaggtcggggaggaaggcagcgaccgaccatggaggccgtggagcatgcccgcaacgaattgggcggtggtgttagaggggacccggcagcaatccagcgtggtagggagctaatccactgcaggggcctgtggggcattcaccgctacctctaccacgactgcaacagcacgcccacaagctcattcatagaaagagagggagttgggaggcccgcgagcttcctccaccctctcagcgatcgccgctacacccatcgccccctaactgctttgctcgccgccgccgcacccgccgcccgccgctccctgcctgccacgcccaccgctccgtgccgctctagcccaccgccgctccgctcgccgcccgccaccacgctagctcgccgccgcttcgccctttgcaactggtggcctcgctcgttgaagaagacaagagaagagaatagcataaagaaaagaggataaaagagaagaagaaaagaggaaaagaagagatggcagaccccacgtttttcttctaacttacatgtaggccccataatttttttttttgctgactaggatgccacatcaacgtaaatagagatccatcctactataggacctaaattgcacgattttgtatagtttagggtgaagatttgtagtattggggattaggggtgtcatacagactcgacgtaaagttgagagacggctggtgaacttattccttttaaaaataagttcatcattttaggagaatatttcccctaagatgcggttatttgaatcaatgatttgaatttgatttgttttgaatttctagttgaattaagttggagcttgcacaacaagaatttgcatttgaattaatttggcgatgtcagaaaaagaaagtttgaagtgtcccataagatctatcatgatgcaagctttttgtaagtttgtttatggttatgatttttgtttctgaatttaatttgcaaaatttaaggattttgtttatatctttcatgtaatcaaaaataagttaaacaaaatcaactatttaaatactccctcgattttatattatatggagctttgatgtttttttaagtcaaacttacataagctaaaccaaattgataaaaatatgtagcaactcttataacaccaaactgtaaaatcaaagtgtgtttgattcttattctgtgatgaacaattggcatctgagattattggttctgatatttggagataattggcgaagtggttttggagatgattggatttgaaggtgatatacaggtactgttggatgtgtggtccggtcagatcggacactggttgctggtcagaccgacgtgtatcgagcggtcagaccggccagcccatggtctgaccggccagcccatggtgtgaccggccagctctgtgtcggtttcagttttgggttatttctttggatatccatgaatagttcatgtttatggcttctagatggatactatgcgtatgtaataatgttgtttgctaacaatgagtcaagttggagatagcttggtcttggaatatggtttctttggttgattcatgtgtaggtgtcttcatgcctcgggagagtattgccgatgatggatcgggagtcaacttggagatatggtgacgtccggatggccagatatcatgcaggatacttaggctaaagatcaatgcacgtggttgttaaagattccatatggcatacgatggagacattatgtgcgtatgggatgcgagtcagaatttggatggagtccaaatttggtacaattggagtttgtaaagttggtttcttgtacaggaaggattcctaggtggattaggacttcttatatgagtttggttcgtggctttaggctacctatatcatgtttaaatagagagggagggtgagacctcccagtatcactttagagagcattgagtttagaaaatagttagggtttcgagtttaatcgagatttttgtgaggagtattgttgttgcactttgtaaacacagagagaagtaataaagttatcatctactttgagagttcttcgatttgtgtttgctctgattcggcagtctaaccaacgagacaccggcggtcagaccgacggcaacgcatcggtcatactggcaggacagcggcggtcagaccagcgatggcacaagcacggtcagaccgacaaatcaactccggtcagaccgatctacatggaattgagggtaacttttaattctgctaaaagttttggtttttgggtactacaaccattcaccccccctctggttggcttaattcttgttgttcgatcctacacaaattagttttattaaatttaacattttatatattttaagagtacatttgtttcgtatgtttaaaatgttaatatgtttttctatgaaatttattaaattcaaagaagtataactaataaaaaaatcaaaatgtttgaagtaagtgtagctcaattggttagatttcttctggtggaaccagcccactcgggttcaaatcctagttttggcacgggtgatcacattcacatctaattattctttgaggcaatttcattcttcccctactttaatgtccaacattgattttgctgtcgtttttttagggttttcttttttactcttgtttttttcaaacgaaaccgcattctacccctactttggatggtcaaattaacggtgttaagtcattttcaaaaagacatttgtaccctcacttatttttgcacatttgcccctatatatgttcattaattgtatttttgtcccagtttgtacatgtagattggaacttgattttttgaagatatttaaaatgaatcccaatgattttttacaagctttgactaatataacaattaggacagaatatcaataaaattatggcatgatcaaattacatatttgacacagtttgatagaatttggacaaaaatttcacagcatttcagcagcatttaacacaatttggacaaaattttgacagcattcctaaaacattttaagcaaccagtagaagtcatataataagcatcacaaagtataacaagtctagatgatagataacacaacgacaccacatattaaaagccaagtcgcacgaccattagtggtcgcagtctagcaagggcctgatcccattttaccaatctacaaagatgattgccaaattggaaggtattaaagtctttgggtaaaacactaaaatcacttaaaaattatacactgtgttcagttcaaatgtaagagatggatcagtgcggcagtgccttaggcctagttcccaactttttcatcacatcaaaactttcctacacatacaaattttcaacttttccgtcacatcattccaatttcaatcaaacttttaattctggcgtgaactaaacacacccttagtggagtttgagccatgtcaatcaaaaagcaaaagaccctatgaaaatgccaaagtggatagaattacagaattttgtgaccacaccggtcgccggcccttaattttcctgtcagcttcgataccagctaccaaagtaccaatcatcgatttattttttttacagaacaaggagtgaagcaagcacagtgattcagtgaacagcgcataggaatctgatgttagatgggtagacccgaccattgtcgtctggacttcaagagcacaggagacgcagaccacaactccaaaaaagccaccgatggaagtgataatgtgtgaaaataataataataataataataataataataataataataataataataataataataataataataacgtcttgcactataaaacaataggaggatggtaaccaacattactttttgtcaaacctaaatggcgagaaaaaaaaccaatctaatatacacataccataactccatgaaaatccaccgaagtaagtgatcatgtgtaagaataacaataagaaaatcaaaacgtcttctaactagaaaaaaaaaagagaatggcgatcaacgttacttgttatcaaataatataaatggtgagccaaataaaatcaacctaatatgcgtataccccaacctaaaaaaaccacgaacgaagcaaacgagcatgtgaaaagaaatgatatatataaaaaaaaaacacgccgagcaaaggccataaacccactcacgctgacgtacgtctccttcgcctcctcccttccgccccaatcctcccccaaaccctagcccctcagatcccccgctccctcgccggtgcgcctcccgccgggcgccgccatgcggatccgcagggccgcttcccgtctgctcggctcggcgtccgccgccttctccgcccaggcggaagcgccgcctgtgattgcgactgcgactgcgagcgagctcccgccgccgcccgcgcctgctgcggcggacgccgccgccgccgtcgacgtcggcctcgccggaccagaggggccctgcgagcagagcctttcgccctgggatctgccatgcgagctcctcgatgactccaccgattcccaggttagctatatagcttagcagcttccgtccccatctcaccttgctctccctgcgactcggcctgtttccattccgccatccatcctgccctgcatgtatacctcgccgcggctcgatcgatcggagcaatcagcatgtattatcttgccacttttcttctgcctcgccgttcagttcttggtgccgtggacggtggccgtgctgtatccattggttatagcgatatagctagggttcgttcgttcgtccttgccgccagaatcagagatctcgcgatcgaagtgagaagtcgcttaattggtggggcatacgaaatggaagagtttatctgcgttatgattttgcgatttgcatttcggccttttggcttgctggctatagggttggggatcagcgaaaatgggcgtgactgcccgttaccaagaacagcactagacctgagcgtgtacatctattgctgtgtcgctgcttacacctctgctccggtaattagaaatcttctgcgaaatatacgtgatgtaatgcaccattgcaccacacgacacacgtcaagtacttgctcatttctgcatctgagttaatttatcctcaattgttcagaacttgcaggaggccccgttcgacaaatacttggtgcgcatcccccgaagggcaagcttcgtgctcaacagcgagctggagctggaagatgatacgatggaatcgaaggacaagatctggaatcacgacgatgaggaggaggaggtcaagaatcagaaacctgctgcccacagcctgaagaaagatggtgcggtgaggaagagatcgagaaaggggaacgacgagcccatcttgcaggaggaggagttggacatggtgatgaaaaccgaagagagcgaggacaaggaggcaaccatctggttctgcaagaagaacgacggcaagaaatggcactgccgaagcatcgtcgaccggcccaacgccctgtgcgactaccacttggcaaggagccgctcatcctacactcccagcagtgagaacggtgcatcggcgacagcagcggcaacctgcagctccggtccaacaaaggcggacgccattggcaagatcaaagctcctcctgcgaagtcatccggtgccaaacgaaattcaccgggaggagcagcagcatcaagctcgaaagcagcagctgcgactgcgactgcaccaagcagctccaaagcatcatcgtcctcatcagtgtcagtaacggtaccaacaagctcgatctcccagcgacgcaagaggaggaagaagtcgactaatggctcaggtggtgattactacttctatgatcttttcggcccgttccgcggaaaggatcgtcgcaaccatggagtagtttcagctagtgaagaagatcacaagggactcctaaaagcaaaagaaaagatggaatacatcgatgtcgataacctgtccaacaattcatcgatcaccggtggcggcgacaaggaaaacgatgaggactacgtcgttggtggtgccggcaaggcccgtgcggagaagaggaaagggaagattgcagtggagaagatgccatttccgaagatggtgaagaagcgtactgtcaaagagcggtcgctcaagtcgctgctctagagttggccaatgtccccgggagtgtaatctagtttcctagtgttgtcttgtctatgtatcatgcatgtctggattgcagcatagatatgtattgactcttttatgtttgtaagtgaataaaatggaatttgacgttttttcagtgtagcgcgatgtttgcagtccagacacacgggctacaaattttggatccttacagtcggagtaggattgtattttacacaactcgacagatgttcctcattttctggaattatattaaatagttataaacactactttaaaaaactctaatagggacggcctcgtgtgtgccgatacatataaaaccggcaggcttttccgttcttccaactcctcatgaaaaaccggcacatgtaactcttacaactgtcggtttattacaaaaacagcaccaataatatttgtacctgtttcaaaaaaaaatcggcactcatacgtaggatattggtgtcggtttcttaaagaaaccgatacctcaaagggaatcgagctgacaagccggtaagctaccccgttttttaattgacacatcactttatctctccacctctctctctcgtagtgtgcctcctcctctttgcatccaccgccgccacgagtgcctccccctactcgcatccgtcaccacctctttctcatctcctcaatgttgtctcctcagcactgcctcctcctgacatcctcaagccggccgatccgtcgccatgagattggggcagttagatccgaccgccacgatccctgggagagcaagatctaccaccacgagctcaggggcggccctgtctccttccccagtccagcggcgatgcacttcctcaatgtccacgccagtcaccgtgcctccctcactccctcatcctccaccttgccatggactgctgaccgccgcgcgtgagctcaggactggattgggcccacgatgatggaggcaacgacccatagaagcagtggctgatcttggggattcagggattttttttgtatggattctgtcttcttatatgttggtttcttctatctcccttgttgatgttgtttttccttttgatgatgcagtggataaatagctaggtattgggtattagatggattctgatttgagtagcgatgcatttgtaccaaacttttgttattcacattgtgacttgtggtattgaaaataatatgtgtttgacgaagaaaaatttggaaaatttttgggctcaaagcattagctcgaattgagccgatctagctagcttctttttttctttttctttttttgggtgcaaattgtgcacctcatcagtgttggttctcaatccggcattgatgagccttctcatcagtgccgcatccgtgatgccaacggatgtgaggttatttgtaatggaccgtagttgtgacccaccacatatgatctagtatgagagatcattaaccatggcccgtcatagatggcctacaatcatcagtgacgggtgggaaattatgtcacgcccaaaaatttagcctaaattttcagactattttgtgtgctaaatcactgtccaggaccagccagggtacacaaaacgacaagtaatatacagttccaaacgtaaataaagcgtaaaatacttacaaaataggcacttatcctcataccggaacgaaagcagcagcagcggaaaaaggcgatcctagcggggcttcagctccactccacaggcataactcaactggggtctgaaccttggtcctctaacttcgtcttcagcttagaagcactacacttctgaaaaggtggaataatagtaaggctgagtacaaccaccgtactcagcaagccacaccaatgatgcagacatgcaaggggatacaaggacggtttgtagctatttgcataaaggcagttgtaaaacattttattgagcaaaacagtaaaactgttgagtaaggtaatattaaatctccactgatcaacgctacaccacgttgaacaggcccaactaacccacctgaactatagtgcattgggttgatttattaagtgtgagactaatcacggtgaatctggtcgatcacccataaccgcgggcacggctattcgaatagttttactctggccagaggtgcacaactgtacccacaagacacaatccaccggcatatcaccgtgtcatcatgtgcccatgatgaacacgtcaccacgtcgagtgattgtgacaagacccttcatataactctcccctaaccatccacactacgctaaggtttcacctccactcctcgcaaggcagcgggaagtcccctcgtgcgccgcggtgaatccggcagctggacaaccggacaccccggccgacccaactccatcacacccaccctcgccaccggtgcctaggaaagggacgagctatactttagatcaagcagttacccactcctgcttgtgataagcactgtaagtcttctagggtttcccgtgaaccagtccttaattgccataggtgcgtctcgcaaaaccatgcacccacagcccaccattcatttgcattttagctggataattacgaccatgaaacatggtcggatgtctcgagcacgcagctcgttctgatactaacaaggtctaatactgcaattatcccatcaactgagctagtggcaattaagcatggctaagcatatagttctaactgtgtcacataagtaacatgagctagtcgatttatcacccaaggttgacaagggacagataaaaagtaaacatggcacaagcgagcagataggtaaatccggatcccatgtaattagcaaaacatgcatatttatttgcaaacggtaaaacatttgtaaagtaggatcaaaatgctcaaggggaatgtgtgatttgccttgcttcttcacttcaaccttctgaactcctttcctcgcgaccacgatcttccaaaacgacggattctacacgttggcaaactataataaaaaccaagcaaacagtacataaaaagtaaacaaacatgtagagcttatatttagatgaattttgcaagttgaatggcccaattcggagttcgaatgaattagatatgaattttagaagttttgagccattttaaatgaatttctagaattattaccgatttattgcgcaattattaaaaattttcacaaaggaaaaggactgtcgctgacgtcaacaagggaagccggcgcgacatgcgggtcccacacgtcagtgacacaagggggagggcacacagtgaacacggtccacgcggcagggacgacaccgtggacccggaccacggaagtggtccacgggcgcgacctacatcggcaaaaggggaggctggctcgtcggccaacccgacaaggcggcggcggcacacgccggacgaccgccggcgacggcggcgcgacgcgggcaagggggcgggggaggaggggaaaaaggaggggagatggagggagagctcaccgagcgccatggcggcgaggggcaacaggcggcggggacgccttctcgggaagacggcacgggcggccttgggcgacgaccggcggtgcgtaatggacggctgaggcgcgggacaacctagggagggtggtagagaggttaggatggggaaaggtggcccgagacagcgtgaatcgctggccggagaaggaggtgagaggtggggcttaccggcgcgcgaggaggacggagctccggtgggttcccgatgacgagaagcgaacgtcggacctcccctcgtcgctgcgaagctgatggaggaaggtgcgacggccggggatggctcggagcggcggcaagcggcagctggaggtggcaaatggcagtggcgtctcgggttcacggtgggagcattgcttcgggggtggaggagggagacggagtggatgccgagctgcgcacgatggctgcggtgctgggtaaggcgacggcgcagcgcgaggtggaccagagaggcgatgcggcgcggctggaggcggcaatggtggcggagagagatggtgaacgtggcggcggcgtttcgtaggcggataggggaaaaagagtaggggccggggtagagatcggcacagcgatgccgatgacggtggtggcgcggcacggcggcccctagggcggcagtagcgggcggctggaggcggtgagtggcggtagtggcttggcctcgcggtgggaaggtggttccggcggtggaggaggaaaatgaagtggatgccgaggtgcggcatagcgcggcgaagccggtgggaccaacggcggcgtgcggccgtggctttagcggcggtggcgggcgactggagggtcgccggcgagcggcggcgcgcgggggcgacgcggggagagcgagggaggcgatgggaagctcgggggaggggggaaaacgaacgaggggagcacggggagggtttatataggctcgggagggtgagatggagccggggtgagttggatttgggcggcaatggccgatggatggaggtggcggcgacgtggggaagtggcggccggattttgcgggagaggtgggggaatgaggaggacatggggcggcagagtcccacggccgggtgtgggcgtgcggagtggaggaggtgggcggattcggcggcaatcgtgggcggcaacggcaggcggcagccatggcggttggccagaggtaggaggaagagctgacaggtggggtcttgggtcccacctgtcggccagagggagagagaggaggtcggttgggggaggtaaaacagacttcgagagggaggcgagctgggccggcggcccgaggggagaagggagggggtggccggccttagagagagggagggcgcccaggccgcggggaagcaaagcagacttgggccgaaaccggcccaagggaaagaaggggaatttaaattggttttctttttattttaattgattaaatgaactttgtgtgtttataaatacttcttgagctccgaaaatttacgggaaatttcagagagttcattagggcacaaagcatattacaaaatattctcgtccaatgatttttaaaggaaattttaatttcccctataatttcacttgataaaattgatttaacttttaatataatttctagaaatgatttatttaatgatttttaatcccgaccgaaaatcggggcgttacaaattatgatccgtcagagatgacttacacatccgtcacagttgactcatctgtaacgggtgttcatccatcacagatgatattttatcatcactacccacttatcacgtcaaatctgttagagttgacgatttaagcccatcagtaatgacctggtcgggtgtggtgattataaagtaaaaccatatataacagcaaaattgtagttataacgaactaaaagtgtgcactatatatagtacttaagcttaacaatatgtaattttaggtgtaaattttcagccacctgaaatctagcaaatgccatcccttccaatatatgtgtagcttgagctcatccatcagtcactgctttatgcaggtttcgtttacaatctctgctaccctgcaacacagattatatggatactctggcccgttgttcagtcctccaatctcttatcttcagacattatcttgctagaagacggatttaagagcttgtttcacaaaactacatattcaacggatttaagtgattcaccatgcaaatagtttcacaaaaatctgtacgtcttcaattcaacggatttaagtgattcaccatgcaaatagttttgagattacgcgcgccgtagcagcttaattattatatgtggaccatgtggtcatgtcccatgatatttgtaccatggaaccgttcaacaacaatttgcatccataactatgacacataaataaattaaataagttaaaaaaaatggtcatctaaccgtaataactggttttgccacgaggcacacttaatacataaatttggctgcaaaatatagccgcttaatgcagatagtaagccacgcaccacgaatccaactctatcaaaaataaatggatatcaagtttatggtatttaccggtggacactagaaaaacacgatatcgtccgagaacactattaatgtgataatttgttgaaggatgtggtctatttggagagagaaacgtacactttgaaaagatgatattaattacccctgccacagtgccatccatgcagaccatctggtctggattaaccggactcattgcccattttgctcgtccaatctctgaaatcctccttacagtcgacgacgaaagcaacagcgtgcttcggcggccagcgtcgtggctaaaagaaacaccaggagtctctcggctagctctataaaatagtaggctagatgatataggtttaaagtctcaccctcactataagagggttgagctatcgccaccaatttattacaacgaaaaataattcatggcaatatattatactatcgcaatgatattttttctatggcaaataactatattttgttgaaacgatttacaattgttgttttattcagtatttttgttgcaataggaaatgagctatcgccaaaaaaaacattactattgccaaaaaaacatgttctatcgccacacatttagttcgttgcaataaaaaagttatcatctcataatttgacttattcttttcatatggacacggattaggataaattttgtatgaaatttatagctctcgatgagatctacaacttaaaatttttcatttgaaatcttttaaatactcaaattcataattcaaatctaagttaggcagtctcaaatggaattgtatgcatttttaaacaaaactgatgcgtaggtgagttggtcatggagagcgcgtgtaagggagagatcttgggttcgaatcctggacatgacaagatatcaaaagaaaatagttaggatgataaattaatattgaaacatttaatttggtacgtataactaatgccacacatggagtggtggcaatagttatttattgcaaccatgtgaagtgttgcaatatatattttttgccacatccattttatggcaatatcaaattttattacaactaaataaaaatcattgcaataacctgttaccacgctatttattaccacggctagcaacgattttaagattgtggcaacatgtatctattgccacaattttagcattgatgctactatttttttcgtggcaataaattatttttctaatagtgccttctaattatttgatattagatccttctcagtattcgtttttttttttaagcgtcgcggctatagatccactggtttgcggccatgggccatgggcggagaggatgctattggcggggtgcaccggcgtggctgtgatatccgaagattgagtagagctagtatagtaacgtgtacacacaacaatgtcaaatttagcacaaattttgataatttgaccctttgcaaaaactatttttacaaataaagcgtcgccaaaagttattttaaaactgactcttttgttcagcgccaaatcgtgtggcgttaaatttagacacctcagcgccaaatagcatggcgctgaatgtacgttgacatgctgacttagtctccctattcacacatttcatactaagtacacaatagcacaaattcacgaaaataaacaaaacaccacaacaacactcttccccggagtgctcatcaaatcaaacaaaccagcaacttcatcccagggacttgacaactctactgatgctcgccattgagttcacgcagtcactgttgttgcgctctcagctgctccccgttgcttgctcccgtcgagtcgtcgacgacactcctgccaacgcctcctagggtcggctccccaccgcttgccaccattgatgaccccgccgctcgccgctgttgtgttgacgccccaactgccgcctgcttgctccccactgctcgccaccgtcaacgatgaccccgccgctcgctgctgttcacacttgacacccgtgccaccgtctgcgagggttggggtgtgacgctgggagagagattaggaaatgggaattggttgaataatcgacgggtggcaggggtaatctcgtactttcaaaacgtttgtctctctaaattggttagaaataataaaacaattgatggagtgctctccaacaaattaccatattttcatggtgttcttggactatatcacttttttaatatctacagataaccacaaaattttgatgcatgtcctatagcaaattttgctaaaataaacagaatcattctttctagttcacttccactaatctgctccctacgcttaacccatcgtagatcgtcaaggaagacaaaatgtgtattaaatccttatccatgaccagccaacgtacacaagagataaagttgatacataaatcgacatcttacaaaacatcctagactcttacatgcataaatacaggaaaagcttaaaacgaactaaatagtggattgatacacaagtggcaccactccacaggcatctttaggggtgagcattcggtcagaccaaactattcggttcagttcttcaatcatttcaaaagttcaatcatctgaaaatggaaaccgaattacattgagaaaaaaatgaaggccaacaaatttggctttagttagtaccgctcggtcttcggtcatgaccagactaaccgagctatttcaaaatcctcgaatcagccacacattcatatcaacaaaaacaaatacaaatagagctatgcacaatccatatatggatgaaagagttggagctgtcatcgtccccgccgacacatcatgagcccccatggggagaggagaggcgcacgacagagggcaatgaaagtgttggtcgtagcagagaatgccgacagttggagtggaggtggaaggtgagaagcgagagggagatgttggcattgcattgactcagggtggaggagcactgcatgctgggttggggtgggttggggagttagccagctggctgggtggtggggtggctttatatattgtcagtgttacgtataaagcatacccaatgattttgggttaggttcaatggggcccaccatatgccaagtctgatacggaatcatgccttatatatggaaggtgttccagataagtaaggaaaaacagagttcaggttggaaactgcaagaaccactcggatcgtatccatatttgtctccctaattctacttagacaaggggatatctatgggtataaatacaagacctctatggaggagaggggggacacaccaactgttaacgcaagccacagacaacaaaggtaacctagacatacccattcagtatcacagaggccgacacaagggatctagctacccccaatctcaccgagttcatattcgtcgaagaagactacactagtcgtcgactacatgttggagatctatgccgccaagccaacattgactagattaggctgtcccaaatattgtactcgtatgatactgatatataagagcaacatcggctttggccaataagagtctaaatgctcagcctagagcacggcccaaaattcctaggattaattaggattttcaactggtgtgcaagattatacaatactacccctccacgcccaaacatctatagatgagaatgcccttccgtatttctgctaccttaatgggatggtagtataggtcatttagaccccttcatcatgacagtctggaactcgcctacgcgctcgctgccatgttgtggaagcatgaaggacgaggtggccgggagcatttgtgctttttttttcggtccacaacttggcagcacctgggcatgtgatttgtggactacgcatcccccttgctgctggtggcttacccgcagtcgagctttgtgccacagcctccagatttacattatcagtggcttgacgagcccaatggcaacgcgggagctcgatgagggtcccggctacatgagacctcgacgaggcccggtacattagtctcaataattcatcaagccatggacttgttctgtctgtgcagcaatgataacaatcgacgttgttcccccaagcacctgctgccattgcagcaaccgcctactcacgtgctggtaaggaggtggtggatgtggccatgttcatgacattggagggcggtgagctcgaagaggaaggattgtcgtgtgttaggcatgcctcctctctaactatttggtgtagttgggcgagaaggtggacgaggaaggaggaatggagattgtcgccatcctttctgctctccccacccggcccttcactggcagatcggtttaagggacctttagaggcccgcgctctatcgcctctgtaggctagtaggaagtggcggagaagattaaattctatctctagaggcctgcgctgtattgtctttgtgggctagtaggaagtagcggagaagattaaattctatctctagagacccgcgctctatcgcctttgtaggctagtaggaagtggcggagaagattaaattctatctctggcatctgtcctccaccgcataggctactaaccttggaggtagcttaaggtcttgccactcgcggaacccagggttaaacctttcggtttagccaatttgattggacctcgccgaaattttgaacaaaatttagttgaatttgaacaaatattaccaaaatgcacgaaaaaattgaaaaagttcggccgaaataatatcgtatcggaggggtccgaaatgaccaaaatttccaaccctagcggagtctccaggaaagagaaggggaactggtggacaaagaagacgagaggtagccacttacatgtgggtctcatgtctattttttagtttctttgatgactgggctataaagtagacaccatgtcagccaaaaccacccttaaaatcagccgggtgagttgttttgcactagttttagtatttgaggaggcaatataccctgttttatattgttgagtgatgtgaatcaaaatccaacaacagtttgagggagttatattggacttttggccgagggaaaaggatgggaataagttcaccggaggtcccttaacttaacagcgagatttgttgaggtcccttaaccgcaaaaccagaaatcttcacccctcaactatacaaaaccgtctaatttgggttctaaggcagtatagatggctggttttgatgacgtggcatcatagtcaacaaaaataattaaataaatatgtggggcccacatgtcagtgagagaaaatgatgtgggccccacatctcttttttgtttcctttttctcttctcttctcaacttctcagttctcacgcgcaggcgagcagatggcggccgacagcggagcgggcgcggctgccggcgccatgggcgctgcggcgcgcggggaagaagcgggagaggaggcggccagcgccagagaaggggagagaggcggccggcgtgaccactcgcacgtgaccgcccgcgacggcgggagcggcggctggcgcccgcctctccccatctggagccacggcgggtgagggggcgagcggcgaccttgctgtcgccagccacgccgcctccacggcaccacgcacctcctcggcacgacaccggcggaggatgcggaggagagcggccgggagagggctcgacggcgagcaggaggatgggcaggccgctgatgctccgccgccgcgctcgcctgcctccggaacgtgccgcggaacccgccacggaacacgcgtctgtccagccgacgcatcgcatacggcgtccgctcttgcggcggcaccgtctgcctccggccgtcgtcgtcgtcgtaatgaaacatccattaattagtttgcacactgcatgcagctagctagccaaccgaccatgccctgcccgaccgtgggctggtccaacacgggaggatgccgtgcttctccagctgcccacgcagcccgacgccgctcagcatcagcagctgcagccgccgctcgccgcaggcaccgctctccgtcgctccgggtgccttcttgcccgccgtcgccgctagtagtcgcgctcgcccgtcgccgcccgccgcctgctccgctctccaacgctccgcctgcctgcttgtccgccatcagcactcgcagccacgctcgcccgccgctgctcgcctgccgccgactccgctctccgccgccgctgctccggccgcttgccgccgcggcgactactgcagctctcccctctgcggcaagaaaagggaaaagagaataaggtagaaaggtagacgatgatgctgacaagtgggcccttactattttcttctcacttacacgtgggtcccatatattatctttttatcttttgctgactaggatgccacgtcagcgaaactggatgtctatactatctagagacttttttttggatggttttatataattgaggggtatacatttctggttttatggttaagccaccttagaaaatcttacttttaagttgagggatctcaggttgacgggagtaatagctgcgcacagagttgggctgttcggcctgctcagtttctgtgatcggaaaaccgtgcaaaagcccgaagaccgaacaacgaggaacatttcccttgtccttttcaagattaatgtggcagcaaggcaagaggataaaatcgaaacttaagagatgcctatctatcataccttcctttctgttccagcaaacatatcgagcagtttacacctttgctctgtctcgcacagttgtggattgttcatatcagcaccatatgaactacacatattttaggtcgtcctccgagaacggaggtactagaaacagcataacacgctaggacctattgcagggagctgggccccttattgtgacttaacgagacaactttggccctagtccagtgaggcagtgtatatgtctgtctgattatcattcgtaatagaaggctcaccgacagtcctggaaggggactgaacattcacaagtcagcagttcaattgagatgatacgacaacagctgaatgagtgatgtactatacagtacttactactcctaacgacgatatgaaagtttcagctcgtcatcatgattttcaaggttccaacccttgcgacaatacactttgaaccaatagaggtagaaaatcaatctgatttgagcaaaattcatagcacaaaatgtgcttcagacttcatgatcaggtagaaaagacctgcagtaacaagtgaccgggactgcaaaagtcagaagaacggggaagaactttcactctggaaagacaacaccttccactacttactctgaaaactgtaaacttatgtaccgaaccaaagagtagacatatatgcagctcaatatatacaccaaatgaacacccccaaccttattcgtctagttacatatccgacgcacccagccccggactaacaggagtagtgcgttttgtgaattgtcctctttagcttgtcaaggataccagcagccttcctccgcgccctcgaagtgccattctgtgcgagccaggccagagagccattcaggttctcatcctcgacgacctccctaagtttcgtgcggtcgtacatacagatagagaagagcactgccaccgcattctctttgttacgtttgcattggtcatcctttatgatgtggagcatgcaaggcacgccaccagtctcgccgatctcctccaccgtctcatggtcgcttgatagcagagcaaggatagtcagcgactcatcagtgagtgactcatcgctgatcgccttcagcaccacgtcaataactccgctttttgtggctcttgatttattctcatgcaacttgcaaagactaaaaatagctgatgctgcatctttcttcgctgtcatgctcccgtgttcaagaagatcaaccagaggcctcattgcacctgactcaccaatcttcgccttattgctatcaagggcagacaaactgaagatggcagctgcagcattgctgcgggcctccatggttcctgactgtaaggcacttatgaggaatgtgattgcctttgtgtcatctccaatgattttcttgttgctctcatgaattgaaagatttagaattgttgtcactgtgtcctctagaacttcagaattgctttccagttctggattggagacagcagaaatcatttgtgagatggaatctggattctctccaatgactgctcggaatgagctattgcgcttagttagcagtcgaagatctttaatagcttgcctcttctcagatatgtttgacgaggatgagatcctgtcaaataattcactgaatgacttccgctcattgttggtaactaaatcttcctcttgattctcaagtggcgaaagagcaattccattctctgtacaccactgtgcaatcatgcttctaacaaggtgatttgggatgagaattgtattagagaggacttgctgagtctgtgggcatgtcctgtttccagcacttaaccattcttgaataaagcggcgatcatatgtctacaaggagaatagaatagttatctcaagctagcacaccaaaaagaaagaaaggaaaacattatgttcttgcacaagaccaaaaaaaaatggcccttcaaatgtaacttacttcctccgtttcacaatgtaagtcattctagcatttcctatattcatattgatgttaatgaatctaaatagatttatatgtctagattcattaacatcaatatgaatgtgagaaatgctagaatgacttacattgtgaaacggagggagtatatattagttactgaagctcagaaaacaatgactacttgccagatatatttataagctgtgtagtttttcagtaattatacaatacaatgtgatcaatttcttagtaagccacagtgatcctggtgaaaaaatatagtactaactcattcctgatgttagtcatagtgatcctgaattcctgatgcagaaataactaactcgttcttgatgttatttatcattaaccccaagccacttctctgttctgaatcatgccaaacaaaaagctatcacgaaccccagtacacaatgtcaaaatcagggaccgcatgcagtagcagctaatataaaggaattatgccaaagcatactaataattaatgcacagtgccaaatctgggaccgcctatacaacaataatcttattcaagagtctgaattgacacattttctgaattattagataaaactgagcaagacacgccgacaaggttggactaggacagtactgcagtgctagcatagagtatggagtacagcacatctctgaaagggacatccaatttcagtgctaaaaaacccatcacccgaacatgcagttaacactgagtatttgaacggccactgcagcagagaccaacagtacaactcacttctagtagttttatgaattcttttaaaaaaataaaactgaaaaaaaaatcttaaaattgcacctccaaaatatcaaaataagcatacaccttacaagtctagataacgaacgggtaagttcactccttacagaatttaacatctggaatttgcaaacactttacttccaaattagtgtagtaattaaaacagccaaagaacaaatcaaaactcccgtattaatgctagacatgagaactagagcaaacgatgagctagtaccacggcatcaacatcaaagatagccaaaacaagcattcaattcacgcagagcttacgtttacgtcagaccgaatataacttgaatccttttatgatttggggatggggagaaaggcaaagaaacagcaagcaaatatggaaacagcaataactcatcacgtgatgctagaatgtggcgtgtcaggtcaatatgcagcagaagttattttttgcgatacacatattaaatattccaaatattagcaataaaaaccggatttcattaatcctatttccacgatacggagcagagttgcttccaaggaaaaaaaaataaaaaacaggatatgaagcagtgtgccatgcgaaattattgcccacaaatgttcatcaattccgcgcgcagagatacagagaacacaggtacaaaatcaaacagggcaatctaaaaggacaaaagaaacagacaggatcagttgtactgtaccaaaatcaattggcccgtaaaaaagagacaggggattaacaggaggtttctttgcgaaatcttcgtagaatttcacacgacagcaatcatatcactgaagaaaagagttggggggaggaggaggatcactagcggaaagcctgtatagacattaaactatagaaataaaaaaaaaagcaatcagagccgagagaaagggacaggtggtggtgtcatcgggagctcgtactctgccacgcaattcaatttattacggtactcgagcttgacgattcatcagacatcctagaagcaccgagaattcaagaggatagggacaaagtagaacagggtactagaaagaagcaacagaagttactgggcacagttgttggtagtactacaatttcttaacaaatggaagtagtagtagtagtaaatgaacttgaggtaaaaaaaattttgactcaaatcaatgttgccactaaacgcgctttgctttgatttcctcgacgaaacccgacgagatgggggatttctagaacagcgattggaaaactccccggaaaccgaagaagcggacccgattttgaccagcaaactgatgacagcgtgtgaatcaatcaacccaacccgcctaccggctaaccgccccccgccccaagtcccccacagggaaaaaacggaggttatacctggccggacgcgagcacgacggggtcccgcatgatctccgacgagatagggcagaggaactgctccggcacggccgccgcctccgcgtgcccactcctcctcctctccgccccggccccggggcggtccttcggcggtggccccagctccgcgtctctcagcgccgcgagcgccgacgccgcctcgtcgaaggcctccccccctccgacgccgccggctgtcacggcggccacgaggcggcgcaggcggaggcgcagcgccgccgccgtcgcctcctcgggcgccgccgccgccgcagcgggcgtcgacttggccatggggctagctgctgctgctggtggtggtggtcgcggtcgcgccgccgcgaggaacggagggcatgggcgtggtggtcgccttcgcgtcgcggggaggaggggagaaggggggaggaatggtggtggtggagagaagaggaagactggaagaggaaggaaggagaaggggttaacgacacattttgggtggttagcaagttaagcgcggttttttatacgggtaggggaggacgctggttggacacgtcacacgattaatcctgtgggttaggagtggccttccttctagatttcccttttttttttgttttctttttgaaatcaccttctcctagacttgtaggcggctggagcttttttattttctttgttattgctactagttttattcgtgtaaatgaaatgcaatattagggtaggaccataagtaagatgtgagtaaaagataatttttatatttataccattcgtggttaaaaaggcaaagttatataataaaatatggaaaaaaatcccgaaataagatctataattatgtttaaaacttttggatgcacctgacaaaccaatgagcagacttcatattcccatgcttttcatgcgggagcaaaaatcctagcataagaaatgaatagtagtcattctccccctttttctttttaataacttcaaaatctttcatgggctctagcttgacctaagctggaaactaagcataaatggtgataattatgtcctccgtttcatcatattatgagttggtttgactttttcctaattaaatttctttaaagtttaactaaggttatagaaaaatttagtgttttcctatacaaaacaaacataaaactaatttgatgctatatatgttgctaaatttttctataaatttaatatataaattttaagtgcagccatagttttccacgccgaattttgaccgtccgttttatttgaaaaaatttaaaaacttaagtcacgagtaaaatactattcatattttatcatctcataataaaaaatactaattataaaaaattttaaataagacgaataattaaaattagatgcgaaaaattatggttacacttaaaataggacggagggagcactactttgtcacagtaaaaaaagtgcgtcgtagcgtatgatccggcaggtaccatcgactacccgccggttgttcacgacgactactcctaccgtcgtacactcttgatcataaccaaaggaaaaaaaaaaaaggtggagagggagaagaggtggataaggcgcggcgagagttttgaacgcgggggagggggcacaccaggccagctgcggtgtcgcgccacgcgttcgcctccagcgcgaagccgcgtcgcgggccccgtcgaaagcaaaaggcaaagaattataaacggcctcgtcgtctgactccgactccgcgggggcccctctcctccccgcgaaggcagcagcacgagatgggcgccctcactccctggctcactgcttatgcgagagcgagacccgttgaacttgtgaacagcagaactgaaggacacccgcgctggctccccgctgggaacacgatcgatgcatgccatcgcggaatcgggacattcagttggaaacgatcaattgctaacccttttgtgtcaaaaagaaataaaaaataatatacagtataaacgtatgcggtcataccatgtactacctccgttctctaatataatataacaatataatataacagatattcactactccctccgtcctaaaataagtgcagttttgcactattcacgtttaacgtttgaccgttcatcttatttgaaatttttttatgattaatatttttattgttattagatgataaaatatgaatagtactttatgtgtgactaaatattttcaaattttttataaatttttcaaataagacggacggtcaaatattgggcacaggtatccacggttgcacttattttgggacggaggtagtattttcttataacgtttgaccactcgtcttattaaaagatttatgtaaatataaaaaacgaaaaattgtgcttaaagtactttaaataataaagtaagccacaaataaaataaataataatttcaaaaaattttaaataaaatgaatagtcaaacagtacaagtaaaataacaaaatttcttatattaggggacggagggtacatatttacttacgttactccgtccttcttaaaatattttaagaatctagaatcggattggatagagcaacatgtttagattcgtagcactggaaaatggaacatccgattcgaggtttttatataacatagggagtatatgcttattattggtggagaaaattctccaaatgaaaacagccctccaatggtagtaagacacggcatatcttaacatgaacggtcaaattaatacagagacgtgaagtattttacgtgcgtctgttacctatactacggaacagggcacaccaaacgtgtgatggtacattcatacgtgttgccgtcatgtacggaaatactctttcctttgagtgtgaacaaccacacaatactaatgttgatgctaagtacttctacttaggcctggttagttccccaaccctttttttcccaaaaacattacgttaaatctttggacacatgcataaaacattaaatatagataaaataaaaaactaattgtacagtttatataaaaatcacgagacgaatcttttgagcctaattagtacatgattagccataagtgctacagtaatctacatatgctaatactggattaattagacttaataaattcgtctcatagttttcaggcgagttatgaaattagtttttttattcgtgttcgaaaacctctttcgacatctgaccaaacatctaatgtaacatttaaaaattttcttttcgcgaactaaacatgccttactacgtcaggactactccgagtacactaccatggagaattttgtacagcgttaaagcacagcataggtgcccacttaaaaaagttgaaaaaaaaagatatctcaaccgatcgatgttgcaacttgcaagccgcagtgataaattcaattctgaataaatgaggtctgaattagaacaggagtggctgaaacactgacatcctgaatcgagcaacataaatggagcactacgaagtggcttaaaactggaaacaatgtggattacactgttcaccatgggtgaaggggacagattgcttgtccatcttgattaactgttggattggcacgcgtcgactgttcctttttgtttttctttttcattccggcgacagataccgggctcgtctggtcaatgtctcgtcgcggcaaatctcgatcacgcgccgcgcgcggcgtgtgtgcatgcggagacgtacgagtcgaaatcacacgcggatcacgcgtgtttttccctgctcttgcgtttgcattttgttcagaaggaggcttttcttcttattcaagttctgcaaatgagtcctcgaaaaaaaaaagaagttctgcaaacgagggccgtttgaaattgggtaaattggaaccatgccattataattttgtaaagtttaagatatgccatcggtatctcaatgacatgtagaacccacatgagtcaatgatatgtgggtcaagatggtatatcttaaattttataaaattataatggcatggttccaatttttcctttgaaatttcaggttggacttcttttttccccacgaaattagcctggaggaatgaggatttgtccattccctccacttgtcggagaacgtaaagaatgagctcaaccatctcctttgagaaccatcaggcagcctcttacttatgtccagtatgataagcagacgtactatagattaactgtgaagaaagagagaagaaaaacagactacaaatttattgttagttgttgcgtggactccaaaatattatctctatatgagacgtgggccaaatatgagtgttgcaatatatatttatataaaaccattatatggataagctattaaaatgactgtagatgatgtatcaatttttggagctaacaattgactatactattaatcttggataatgggtcaagatggttgggatcgggataataatataagaggagggttgacatgaaatgagatatgaataatgggtaactaggattaaaattgcattttagaagataagtagcttgactagtaacaacgagaagtagcacaaccgtaaaggaaaggaaaagaaccctggtgaatggatgggaagggatgttccaattccattatcggtaggttcacatgctctatcataatgacactattatatagacacttaaacgtgaggaaatattagaatgtgacccacgtattagtgactgtaatgatagtgatattatggtagaggatcctcacctgttaccgacagaccctaagcgtcttcctgagcaaccaaatattctgttaacaaattaaagcctgtctcctactcttcttttcaatttgtttttgtggtgttccttcaaaacaagccactttatcgtgcgttgcgcgactttggatacctacataaaaagtcttgtatatgagctgcaacgttatattataaagttccatcgtttggtatattgaagaaaaaaaaagagaaatggcatatttgcaaataaagataatttatgaataaaaattttatatatgtgttctaacgatctaaaagcaaagaccgaaaaaaactatgatgaaaaaaatcccaaaatcaactccaaatttaaagttgaaaatttaaattttgactgataaacataaatataagcgaaaatatgaggttgataatctccttctttatcaacgaaaaagagacatgtctttttgtactcttattccaaaaaaaacaatatattacagtgagttaacgcactatgttgtgtgttagatgttactttcgatgtctatgtaaaagccttgtacatataaactgtaataatatagaataattagattttacactaagtttgaaattgctataaaatcataggactaaaaacagctagtagattgtagttttatatatatatgaacctacgatcccaagtaacagatatatgagtgctatttaggactctttcttaatttaggattttattaattaggttactttgataagaatgtaaaattttattaagaaatatcttttcgatatgtgtagtattttaaatttatgcgaataatctgtataaaaactacctatagatttgatttcactatatatttttcttctgttaaactgaatttatttttacttgtcaattgtatagatgtgctttgatttgaatcaagcttcatttaaataaaagaaaatacgttttaattttattagtgtaaaaattggtttgcattttctctaaagttgcgttttatggtcagatggccagatgggtaataagtttgttcaccggttgcatagggaaaaggagtacctcctgttatgtttttttcgtcttcttttcttcctcgtggccaggattcacaaagccgacgaaagctggtcagttttcgcggtttttcgacgtttcgatactgctcggaattaattttcgatgggaatttcgaaggtcaaacagtaaatttggtcgaaattttgatggggcttaaaatttagtggtcaaccggtaatacaaaccctgctcgtgacttcttttctttgacccaccatccaggcttaagccctgtttagatgggactaaaacttttaagtcacatcggatgtttgaacactaattataaatattaaacgtagactattaataaaacccatccataatcttggactaattcacgagacgaatctattgagtataattaatccatgattagcctatgtgatgcaacagtaaacattatttaattatggattaattaggcttaaaaaatttgtctcgcgaattagcttctatttatgtaattagttttgtaaatagtctatatttaatactctaaattagtggctaaaacagggactaaagttaagtccttggatccaaacaccaccttagaagcctcctgaagcatcctgacaacctgttttttatttgattctctgttggctagaacagatttcatatccaacagtaaattttttgttccaagctgcacctgacggctaccaattttcctatgacgtggcacatcctcttttgagatagcttgttgctttcacgtagtatatattaagatgtttcaaatgggacatctcctttttctacttaacgttctacaggccagaatataaaattgatcagttcatttccactgcaaatcaatagaaaaggtaaatctgtttgacagatcgaattacgtacaaacagcgcgtaaaacaaacaaccttcacatgcgtgcatttccccgaatcattcattggctctggttcgaattcgttgaaattaagcgcaggggcgacgaacgttaagtcttgagtggtccaggaatcagcagcagagcaagccatgtagctgcagcgtcgcaaagccgtgcgtcacgcgggttggggcacattggacgtacggccagccgaagaaccctctcggctctcacactgaatcgaccctgcattttgctggcccatggatcggcgacaaaagcgagcaccgagagcagccagcccctcacaataaaatcaaagctcagaggaggatcgagctagtcttgtacaggtgtacctgtacaccacagctttctttcgacatctccagctcgatcgcttctgcatggaaataacgcgtagctagctagctagacccatatcatgcatgcagtggcatttgtttctgcgtgctcaatagacccacggtcacatggtcatctgcccatcgatccaaataaactcctcactcatttttcatattataatttaagtcgaactgatattttgttctctaatcaaattttcttaaatttgattgagtttattgagaaatttaacaacatctacaacatcaaattagtttttattaaaactagtatagtaatatttaatatattatgataatatatttattttatgttaaaaatattgttatatttcattataaatttgatcgaactttattaaggttgtcttaaaaaaattaaaaaaatcaccaagcaacttataatatcaagcgggtgaagtagctacggtacttctataggtgtatatcagtgtatatcaaagccacaacgatcccctccttcggtacgttaatttattactccctccgtttcacagtgtaaaactttctagtattgcccacatacacatggatgttaataaatttagacacatatatgtgtttagattcattaacatctgaatgaatatgggtaatgctagaaagttttacattgtgaaacagaggaagtacctgtcatctatctgtatactttttttttacttacttataaatgtatttcttgcaattacaaaaaaacatatccgttctctagatacgatgcaagtcaaacataaaacttcagtagatttagattggatgtaaaacaaatcatgtcaatatttgtctcgaaaaataaattcacaaatttatacttttatgagatctttcaaatgttttgcaataaacatttattaattgaaattgcgttttaaaaacgttttaaaaattaaacccgcgtctaaacaacgaaatttcgtatagcatgtcagtgacagttatatatagctactacctccgtctcaaaataatttaagctgtgggtatctgtgtccaacgtttggccgtctgtcttatttaaaaaaataaaaaaaatagtcacacgtaaagtactgttcatgttttatcatccaataacaataagaatactaatcataaaaaaaattcaaataaaacaaacggtcaaatgttggatgtgaatagtgtaaaacatcacttattttaagacggaggtagtatttttggagtattttgtaaggcctggtttagttcccaactttttttttcaaacttctaacattttcatcacatcaaaacatttctagacacataaacttttaacttttccatcacatcgttttaattttaatcaatctgaaacaaaccctaatccccaaaacgtcgatctgagttgcggccggagggagaccatttatcaaagacgcgtgcatggcagccacatgacgtgctgcagggctagctcattttgccacgtgtcacgcaatcatcatgtgcgtaggacccagactggcatgccttcggggaccggcctgcacgaatataatagacatcggtggcccgtagtacggtactatgtaatatgttcattttgttttgtgttaagtttatatttttatttctatgaaaaagaatatgtcttcttcataaaaaaatagtacttagtacaaaataaatcagtagagaaaaagattaccttgatgcttcacattaaataaggggtggatggaagtaaaaggtcgggatataaagaaatttgaatgagatgtgttttgagaagaagtggtattttagaatgcatttttaataaatttgaatgctagagtttctttatatatatatatatatatatatatatatatatatatatatatatgtggaaggtagttatagatattaactaaattttcaacaaacttaaaattttgatttagaacaaatctaaatgcgaaatggagagagtatgtcttagtttcgttctatttttttttcacttagcgtttcaattaatccaaaacccttaggaatgaaagaatgcgtatacgagatgccttacactatagaagatcgtagtatttcaaaaaatctgaatttagaaaaaaaatattatgaaaggttaataaattatatgaaactgtacttttgtccaaaatcgttatttcttttatcctaacattaaccattacggaggaggtgacgatggtgtcactgcgtggggacagcacgtgggaggcggaacaacggttggccggctgggtagctacagcggtggtgggagaaggaggagggcgagactgtgatgacgagtgcggtagacacggggagacggagtactggcggcgaacggtgacgaagaggagggtatattaaacaataaacatggaaatttaattacgaggaggaggctcaacgatgaactgcaatgtcaaataaaaagaacgattctgatttttattatagtgtcatacaaatcgaaacggatggccggagtatttcataaaattgcaataacaattgatttcatcagatcgcgtggggttggcttgtgtgggttgttgacctgagtatatatttgttttatagatgagcttggaccaattggcacattaataattatttcttttgtttttgataaagtaattaactattgatgtggtttttctaaaacgactagctagttaagataatctagcgcgacggaattgggatgagtgtttaagatgttgtttttcatgaaaaatgagatgattcaacacttgtttatggattgtcattatgcaaagtttatttggagagctgttcaattttcttttggattataccctcctagtagcatatctcatatgtttgacggttggcttcagggtgtggataaagaaaagagaaaattgatacttgttggtgcctctgccttatgttgggccctgtggttgtgtagaaaagatagggtttttgacaaattgccatttgtttcctatttgcaggtaattttcagggcaacatattggcttcggcggtgggttcaactacaaaagtgtaaggaagatggagttttcctgaatgttgcatgtcgtagtcttgaaacaatggttatgcaacttttcgccaaccatggatggagattcaccaatagactggaataatattttccttgtcatgttaggtcttctttgaatttttggttggttcgctagctttattttggactacatcctttttagtatgctactttttgtaataattggctctagttcttcggagtaaaggccgggatatttcattctattattaaaaaaagttaagatatttattttggtgggttgttcttttgaaagctctatcttttggtgaatgtgtccatgcaatgcattgcctgattgatcagcaggagtcttcgtgtgtagctagacgaactagcggttagtgcgtcacttctcctccagcactaatccatcccatgtattcctgtttaccactcaactgatgaacgagtagacggctaattagtccctttgtacatggtgacacaccactaaccggccacttaattaagatcgatacatgcatgattatgttattaattaggagcaagtatacgcgaatctatacctcatttgtcgattgttgtgtcgttgcttatgcccatcgatccatatacaccaggtgttttaatttcatcccttctttttcattattgttttgaatcgtacgtactttcttaagtttattagagccccatgttcaagcaaggataatgcagtcgtctcaacatgcatgcatatggatacatgaaattaagcagagaagataaccacgaatatccaagtccatctaatcatttaatttaatcaatatccatttgtgtcgtgtacgatcccctaatccaaatccatatcttgtcgttgcattgcatgatatcatgcatgcaagtctatgcatggtacgtgtagacgatatgcattatattaattaaagcttcatatatatatctattccttaaaaaaaagaaacaatctataatatgtttatatatatagtcctgaaggcaatcccaacccagaaactattaggtactccctctgtttcataatgtaagactttctagcattgctcatatttatatagatgttaatgaatctagacacatatatgcgtatagattcactataatctatatgaatatggttattgctagaaagtcttatattgtgaaacggaggaagtagttttcatacttgtcatatcatatcaacaccatgcactactacagaaatagtttttacatgcgggtataattaagtgatttttgcatgcggccaatgcaaccgcatacggcaaaaggtgcgaaaattggattttcacatgcgggtagcgcaaccacatgcaaaaatgagatttttttatgtggtcacttatacctgccacatgcaaaaataaattcggcgaagaaaataacaaataaaaataaaccccaaaccctagcccgctgccgtcatcgatcagatccgcgccacttgccgttggagtgcaggatccgccacccccaccacccgtcgtcgtcactggcgccggatccgccacccccaacacccgctgttgctgccggcgccgcatccgccgccccccaccgtccgccgttgtcgttggcaccggatatgtgcgagggagggaccccggcaccggatccgcacctggtaacactgcctgaggccggcgaggcgcctagccgagtcgcccgctgctagctcctggttaccgagacgcttgccgctatcggctcccgctcgtcggaggagaggagagagagggaggagaggagaggagaggagagagaggtaaatatcaggatagggggagagagagagagaggagaggatgtgaaaaaaattgaagcggtgaggagggaaataaaactgtgaagaacttgggtttattttcgcatgcggaccacttagaggcccgcatgtaaaaaaatatattttttcgcatgcggcaccttaagaggactgcatgcaaaatcagactcatttttgcatgcgacctcttaagagacccatctgtgaaaatagatttttacatgcgggcctcaagcaaaaatgtaggtcgatttttgcagacacgacaagttatgggccgtctgtaacctaataacctattaggggtcctcatatagaaaaattattttctagtagtgatgtatagaaactatatgttttcaaaataaattttcatccagtcacttcttttcctctcctttcatacacttatcttctcattttattttttggttaccgtgtagagctagttcatacctacaagctcgcgagcttagttgagccgagctcgagcttctcacgagcctaactgtgtgtaatatttatcttttatatgatagcttaaggataaattagtacatattcatgtgaacaattagtgtattttggcatcatatatatattaatcttaagttctcatattgttaactaaaggaaaaagtatgaattaccccctgaattattacggtcgaccgaattacacccctgaacccgaaaaccagatattgttcactctgaactttcaatgccgcacgaattaccccctcgatccaatttagagtggttttgtcttacatggcgtacatgtggcaatccagtcaacattttctaattttttaaaaatgtgggacccacatgtcaaacggagtccctcttcctctctcttcacacactctctatctctctcacgggcctcagctgtggcaggaggtgggtggcggacggccatgtgtggcgccacgccccgcaccggccgagacacgggcatgcaggcagcatcgcagtgaggacagcggggtggttgcgcgcataaatatggccgggcctcccgcttctccggcggtgcgaggctgctcgcgccggggacctcctccgccgcagccgtctgcctctgggacttgatcaccgctagcggcgatggtggtggaggaggaggggcgtggtgggacgccaatgaccaccgccaccgcgaccacccccaccccccatgccgacgagcacgccgcccgccaccgctgccgcaccggcctcctcgctgccagccgcgcccgccgctgccactcgcgccgccgcccacctcctaccacagctgaggcccgtgggagagagagagagagagtgtgtgtgtgtgtgtgtgtgtgtgtgtgaagagagagagaggggaagagggactccgtatgacatgtgggtcccacattttttaaaaattagaaaatgcccattggattgccacgtgtacgccacgtaggacaaaaccgctctggattggatcgagggggtaattcgtcctgtattgaaagttcagggtgaacaatgtcaggtttcgggttcagaggtgtaattcggtcgaccgcgatagttcaaggggtaattcgtactttttccttaatttaaattattattttttacaaaattttatcatcaaaatatacattatcctatactcggttgagcttgcgagcctaaccgagctcgagccgagcatgcttaaaagctcgaaggaggattagactcgattcgagctcgactcaagcttgtgtcgagctcaatcttagatagacaatcttgctcgagctcggatcgttgacaaccctacttgtgaccttaactttttttttcgtagcagtatatttaatctatggaaactagccctgatgaagttacatgagaataattaatactctctacagttttcccacatataaaagttgtcaaatgttttgcttatcaacaaccaagtgacctcaaaaccttttcacgagtacagatgtataatatttgcatgcagatataaatatatatttgtatacctacctagttggcaatgactggacaggtaatgttgaagttccttctctaccatatacgtagtaattaattgcctaaacaatgtaggatcgtttcttcttcaaaagcgccgtgctaatgattctatagctaccaaaaaaactctatatgtgcagatttgggcgtcctcttgataagagaaagacaaaaaggcattccggccggtgaaaaccgaaccctgtttgattaatcgatctgaagcttcttccattgtgaccactacttcactaactgctctccctattcagttccctagcttgaccgatcggttggtcccatgtcactttcacaagtgcaagaagtaaaaccagctagcgagctgagcgagtgcttcggaagaattaagtacagttgtcaggtaatcaagttgcaagtagttagtgcttcttactccctccgtcctgaaaaaaatactggatgtgacacatcctaatactacgaatctggatatacctctatccagatttattgtactagaatatatcacatccagtactagattcgtttttttgggacggagggagtactctatagagtaccgttgtatttagttacttcctccatcctaaaatatatttaatgtactagtaatgtactccctccgtccgtgaatatatatgagagattttgacattttgcttacaccgtttgaccattcgtcttattcaaaaaaaatttagaattattatttattttatttgtgacttactccctccattccaaattgatctacatatagttttttttaggttattcctaaatgatctacatatttatgttcatttattagagtctatttgttatttgtgtattggagtaaatggatattgatgcatgcatccatgcacacaagtatttataacccacatgcaatatcttgatttgctattggctagaaaatattgaggatggtgcatgcattgagtttgttgctagagtaaatatagtatgagagagttattagcttttcttggtcttggtgtacctatgaaatatgtagatcaatttagaatggagggagtactttattatccaaagtactttcagcataactttttattttttatagttgtacaaattttttgaataagacaagtggtcaaacgttacacagtaatagtgaatatcccttatattcatggaccactacgctggatactctcaccattgacgggcctatatcatcacctctgacgggtttggccctcgtcagagattagtggtcactgatgacagcacctcacctctgacgggtgaaagcccgttaatggtgattaacacctctgacggccgcatagaaatagcccatcacaggtgagaattacttgtaacgggtgactctttccagcccgtcaaaggtgacatgtacctctgacaggtttaatttatcacccgtcacaggtgtgaaaaatcacaaaaaaaattcaaaagccctaaacccccagccaccagctctcgacatgaagcaaaagatgcaagattcatcccaagatgcaagacaacatcagtgaaacaatatacatcacacaacttgagtaacaatatacatcacacagttactgatctgcatcttaacaaactagacatccacacaaacaacaaagaatatggcctaatctaaaatttggcaatgaacatttgcaagataacaaaaaacaagcaaaggtcagaaatggcggcggctcccgtgggtgaaggagatggtggaggccgcggatgccggcggtcgggtggcgttggaggagtcggggaagaggccacggacgccgacagttaggggatggaggcggcggccgccggatccacgtctctgaacctcgtggaggccagatccggcggtcgccggttgggtggcgttggaggagtcggggaagaggccgcggacgccgacggttgggggatggaggcggcggccgccggatccacgtctccgaacctcgtggaggctggatccggcggccggtgctcaggttgcgttggaggagtcgaggaagaggccgcggacgccggcggttgggggatggaggcggcggccgccagatccacgtctccgaaccttgtggaggccggatccggcagccggcggtcgggtggcattggaggagtcggggaagaggctgcagacgccggcggttgggggatggatgtggcggccgccggatccacgtcttcgaacctcgtgaaggccggatccggcagccgtctgtcgaggaagaggctgtggcggccggatctgcatcccggaggccagatccgcgggtggtcgtcagttgggaggcagggaaggcagcagcggcgactagatccatgtcctggaggacagcggcggatggatccaagtagaatatagcatatcgatcgaggaaacggaggagatagtggtggatggatccctgtggaggctttcttgggagagagtgatgagaggaggaagaaagaagagaacagatgaggggaggagaagtggtgcacggggtgggtgcgaggacgggagggtggggggttggtggggagggcggtggggggattttttttaaagtcatctctgacgggtataatatgttaactcgtttgagttttggtacctcacctttgacgggttgcaaatataatacccgtcacaggtaactagtcacctgtgatgggccgcaaatggaacgcgtcagagattgacctctgacgctttctatttgcggcccgttacaggtgactagttacctgtgacaggttgcagtcggatgcctcatcgatgacggcatcctgttggacccgtcaaaggtgaccctcatcactgaccagcgctgaagcccgtcacagatatgtcatcagaggtgtgaggatctggcgtagtggacggaggtagtactaaattagacacaacctagtggacaggtccaatatgtgtcaaatctagtattagctaaattataatattttggaagggatgcaatactagtaatatatatgcgcgcccatattcctatgtaattaggaatgtcttaggtgtggttctagcctaagcaacgtgactatttttaatcaatcctttctgtttgtgtttttgtttagggaaattttcagtttatttttcttgtgtgagggtgtcttgcagtacgtgagaggaggggaagatagacgactttgcttttcgcttttaagtagtagagaaaatagtttttttttaatttataagcacgctgtaatgtgacttgtgaggtagatatttatttcggatagaatgctgtacccttctgattggacaacattttttacaatggtctctcctggtatatattaatctatgttccattactagtacaaatattatgagtcgtcgatgcaattcctctgattttaaataaaactctgaattcaatgaaccagtcagcatttgcacggcacgtactttgcaccggtatatcctgaggggatatggattatcagacggaatatgattttcatccatcgtacaatataggagtatataattatttagtttctggctaatcattcatgtgatcaagttgctcacacagcagatggagatggcaattgtttaatcatacaaggtaaattaagagatgaagtgtggtggttgctgatgactgatgagccattacatcacatgatcactatccatacatgcgaagttcacaaggctagtagctcctactagagctaattggaattacacacatgtgggagctacacacttgtccaaaccgacggcctagttataggctaatgatcctgttacgtaaacacctagctagctttcaaacgtatccctaatacaaataccctatataatacatcatgaaagtccttttagttgtatatatactgcctgcggaaaggttcgtagtctaatggttacagtgatctgagtagcaccataagatttttagttcaaatttccatatgagcaaatgggttgtttgagaggctaaatttcgaatttaaaaggttgcttatacctggttggatatataagccgggtaaaaaaatatccttatctaaaatatatatatatatatatatatatatatatatatatatatattatagctttttctttaccgaattaatccatgaaggagaaagtaagagagccatattctctccataatttattactacacatcccatctcaaaaaaaaaactttgtttccagctatgtgcccggacaataatctcttaatcgaaactaacatttttttttcttttgcgaggagtatgtgtatatacttacgtagcatgcagtaagtctcattcgaattcggtacatgaatagttagtgccaagtgagtcgttctctccaatacatattatgcacggttggaagctttgtccatcactcaccgaagattcttctcgatcgtcttgcgtatatggttaattgcgaaaaacaaattaagggttggctagtgatatcaaagtgccaaccaccttttcgttaccctgctagctagctagcgctttatatatatccatgttaatcagtgctgcatgacacggacgtcaatcccctgtaattcgcctggagcaaaaaattagatgggggaatataatatcacattgagcgacaattcgtctcatatatatatataaaaaaaaaagggtgtttgagggcagtctcgtttttctcttatcgttggaaaaatcataataaaatataacaagatagattaatataaaacaaaatagattaataagtagtaatatataactctataaatgtacatgtctaaattcgagtttacaaattttactaaaacccaatacaaatttgacaaagaaaaataaaaagtctaaatgtaaccgatctgttatttttatttccacttatataagtcggattcaaacatgtatgtctgaagataatatatcatatatttagctatcattataaaaaaaatttagctttcttgaactagaactcatacattcaaggacaagaatccacctcgctcatatcctatatataaatgatatggttcacgatcgtctgtgattggtacctgcatgcatagatggagagttggatgatgaggagatctgatctctctccattattgattaagtttctctgcttttgttagtcgatgcaaaaggtccccaaatcgatcgacaatctaccagctgccggccggccatctctgcagctgcaggtccatgctaccaccactgatgatggaactctagccaaacacaagagattattatttgggcatatctgcatggcacatcaagtggcaacacgtggcatgttggtgctatttgcgtcatcataagtttgacatttctcagtttcatataattaatctcacgcaaggccgagcatgcagggtgctagcaaattaaatactctgatattcactcaaaataaaaatataaaatgtattttatttcgttagataaaactttaaaaccaacaattaccttttttcaataattattatgttggtgttactagatttgtattgaaaatatttactactatgattatacatttgtatcacacaaatgatacttaataaagcaattattggttaaagttttttcctaactatataaaatacaccttcttaaaaaaaatgttacggagtactcgcgctcaagtcacattattgatttagacatactccaagtttcacttttaaaaataaggtacttcttcaatttcatattataagactttctagcattttctacattcttatatatgttaatgaatttaggcatgtttgtgtacctggattcattaacatctatatgaatgtgggcaatgctagaaagtattttaacctgaaacggatgtagtaatatatttaaatatttagattgaatgtgtgaaaatcaagtacgcatgtgttgatttacccacaagaagcaaataactttcttcgtgatacctgtcgattcttattaggttttaattgttttgcagtaagaaattggtggtcaaaactgcacgttttttcagattactaatatataaaaaaaaacatgcgcttttaacatatactagtagtgaaattaacatcatcacaactctaacatggtgaagtgtgcttaatttttcattatattgtacaattaatcatgcccagggtgattgaaaaagtagtttcggttagcaaccgaaatcagaagaccatgcatgtatacagatcgactacagagagctagctagccatatactatatcaggcttcttatagctaattggatggagcaacttaaaaaggtggttgagttcaaaagctagctagtaccactagcttataacttattgcttcaatcaaatcaacgccccaattatttacacgtaaatccaataaatccaattaaacccctttaattacgatcggattaaattataaagctgggggtttaatttggatgttgccgcgaggcgtcgaaaacgacggtgcagctggtaattaaggtacatatatatacacatcgtcgcggctggcatggcgagggttgttaaccaaaactcgtaaagcaggcggcggctgattggtgtacatccaaatttcaagatcagggcacacacttgcattgtgtgtgtatcagggatggccagtggccggcctccctccaacagttatttttacgtaagatcatctaattaattagataattaatataaagtaatagtgtattaggacaacttggaataaatatcactactagaaaaaaaaaatcattttttccagttggccaaatcagtttttcgcaggcgactagcccaaccgcttgaggacaaatgacctgccaaaatattgtattatcataggtgggtagacggctgcctacgaaaactaatttttgccggcggactcctaaagaggtattttgtgaaaataattttagagcacaaaaaacctgaaaacaaatcaaaaatccccataaaagcaaatccaacaattcccctaaaccattcacacattcatcacaatcctcaaatccatttaacaaattcatcacaatcctcaaaagcattcaataaattcatcacatatcaacacaaagtaaaaaatctatcgccggttgaagccgccgctgcaacctgagagcccccaccctgacacacccccaccgccggtggaagccgccgccgcgcactcctgttgtagctcctgagcaaacccgcggcggatccaccgcgcgcctaacaccggctggcggcgaatccaggcgtcgttgccattgtctcggtatcggtggatccattcgtcattgatgttgtccaagcgttgacggcggagacggccatcatcgtcatcgttgccatcgtcgtcgcggcctggaaagctcaaaggtggaggaaggccggagtagatggtgtggggataaggatggaggtgggagaggagtgtgaggtagagggagtaggtggagggagagagagggctgatgaagaagaggagatagaattcctgtgggacttacccaaaatttaatgcgcctccacattttgaggcggaccatttaaggtctcgtctaagaaaatcctatttttctagcccaagccttaagggatccgactataaaaaataaaggcattttcgtatgcgggcctttcaaggctccgcctataaaaattgatttttacatacggaccttaatcaagaggagtctctagctatttttgttcgccagtgaaaataaaagtcaatgtcagtaacaatggtttttatatttacttatttttccagcttgtatagatcatttcatagcttggtatagcccatgcaagctagcgacatagcgaggcttacttttgttgctacttttgtgccttacacatggaatgcacgccatgtggtgtgctgatcgacttggcaatctagcagctacatcgatgagctatatcatgcttgccaaatgcgacatgatatgtggatttaccagtgatcctgttaatagcattgtagctttttccgattcaaataagtataaaattgattgctatatattaatttactctgaagttttggttgtaattcttcaaccatgtgcattctagagtgatatgcacttcatcttattttgagatgttaaaagatatagcaaagatgctttttgtcggatgtgcgtgtaggccgtgtggtttgacaagatcatggctcctttttgctgggaactactccgtaggcaactacagctgcatacatgattactacatttacaagtacatctttacatgtgcattccaaggggtgaaaaagagaaaggtgtcaaatcttgacgaaaggtaaaaaagggtcatggaaaaaacttataataaattcaagagatatatactcactccgtttcaaaatgtttgacaccgttgactttttagtccatgtttgaccgttcgtcttattaaaaaaaaattgtgaaatatgtaaagctatatgtatacatgaaagtaatttaacaatgaatcaaatgttatgaaaataataaataattacttaaattttttgaataagacgaatggtgaaacacgtactaaaaagtcaacggtgtcaaacattttgaaacggatggagtattttttaaggagaaatgaagacagtttaggagtatcttccagtcaaacacggatcaatccgagaagaaacagcccagtgcgacattgtgtagagagatggtccaggttcatgtcaccttactgggccgcgagttgggctaaaaaaagttcagtacgcagcacaggatccttcatgggcggaccaaatttagaacagattggtagtaactcggagtttggtggagtagagcagtgcaagtgggaataagtctaatattgtccccctccccctctcaattgtaggttgaatctattttatactacctccgttttttaatatatgacgccgtaaactttttctcacatgtttgaccattcctcttattcaaaaattttatgcaaatgtataagatataaatcacacttaaagtactatgagtgataaaacaactcataacaaaataaattataattacgtaaagtttttgaataagacgaatggtcaaatatgtgagaaaaagtcaacggcgtcatctattaaaaacagagggagtatctctcaaccgtaaaaaagatatatcggacccttcaaatattaaaatcggtgcaaaatgactccctagattgtatttgacaatagttttcactaactaatctggtccaactggctgaattagcatgtggggtcacacgttagtgtcctctattatttctcccccactcatttctttctcttactttctccactgtcattcgtgagaaatttaggattataccatcacaaaagagtggtttcgctagaatgtcgtcccttcaaactgattcactataataccatcctaaactgagaggtgttcatcaaaataccattttcgttctagaggggaaagagagaagggagagagtatgacaggtggggcccatgtaaagggtattttggtccgggaaaatataaaattgagcaaaaacatttctattcacataaaagaatgaaaattgcattttggtgaacacctctcagtttagaagggcattacagtgaatcagttgttggaattaatggatgggccttagcccactcgaagattaattctttggaaaatcacaaaagcccacctcatgggatggcatgcatgtggagtttagtaccaccttgtttattctagaagagggggacctccataaaaggaaggatgccctcctagccatttgaagcatgtgtggtggagagaagagggggaacacacgcgcgtgctcgctcgcctcacctgcctctccctgttcgtccgagacggctcgtcttcctctccgctcgcgtgctgcgcgccttcgtcgacgcccgcaaccgcgagtagttcctgccggggtacgtgttcaatatgttgcgcatatttgatctgtttatgttataatgtgtagtttatatgtgtagatctaatgatgagttcatgctagtttatatctgcaatgtcatgatttatttatggaataaattcattatgtgcttataatttcaacatcagtctgaagggatggcattccagcgaaaccactcttttgcgatgatataatctcaaatttctcgtcatccgttgggaagacggcgatggtgtgggaacaggtgaggagctcgagtggctggcgaatcggcgaaaccgtggttctccgcgctcatgggcgtgcacgacatttcctaactcgaaaaatgatattgcggctcggcgactggccatatagatattgcggctcgacactgtcgcctttgtcgtgctcgtagctaagctagacgcctcagcccgtgtgccacgcgcccgtgtccgacctctatagtggcaactctcgcggccccaacgggacggaaaatgcttcaatccggtcgtccgatctcgagaaaaaaatcgaacctctcgttatgactttgttgcatgtaacttttttgtcagatcctctctttacacacttgttacacaagcttctctactgagcagtatacatgaaggagagaggacacgaggtatttgtatatacataacacccttttagcaaacttaaaaatgatttttcttctagattacttatccaatttatgatccgattacaccatggtattcgttacaattaattttttataacaagatctcacatgactatgttataataaaaaaatacacatatgtttcaaccaattaaatttaatgtttcacttgtgagaataagatgtttcagatgaaattttattatgttgcagatatttagttagtgtcgcaatgtgtgtgtgtatatatctatatatatatatatatatctttctttaatgtatcacatggtgctatttgtatgtttcagtaaatagtttataatgtgtcacaggtttatttgtaagtattgcatatgtgttggttgagtgtttctataaatattcactagttaatttaaaatgtttcacacggtgtcattcatatgtctcagcaaatattaaaaatgttgcaaatattgtacgattggattattctatcatattttttgtaattaaatattgtcacgcccagaatttctatccaaaattccaaacgcttacatgtatgtgaaccctcgtccaggaatcagccgaggcacacaataacaaattaataatagagtaaaattattactctaattaataagtgaataaaatgtcattacagaggtagatagttcctctcaatcaataaagatctaagcagcggaaaaaaaaagataaacggcgcagacgactccactctacaggcagcttgaccagggctacacctaatcctccacaccatcagcatcactgtagaactcctcctctgatgaatgattgcaaggtgagtatatgacatactcagcaagccacgcagcaaatatgcaagtgcacaggataataaaggatggcatagtatggtttcatttgcataaacagcatttaataaatatttcagaatttaataaaacagttaagtaataattaaacaatattaatccaacgctatacaacataccctgttgcataggcccaaccattctaaacaaccaatcccggctgcacagttctatctccaaactaggaatatgccattccaaaccaggagttaatcaaattattaacaacatcatttaatatagtgagaggggtgagactaatcacgaaagacattgttagacctgcccattaccgcgggcacggctattcgaatagttttactctggccagaggagtaccactgtaacccacaagacacagccccacgacatgtcaccatacgcctcaataccaccatggtacctcggaaagaagctgtgacagtacctctcgcacaacacaatccaccacagcgcaccgttcctggatcataattacccccttataaaacaaggcatggactccccagcgaccccccgtgggcttatctccgccacttctcagtctggtgccccgcaatgaaccatgctatacaaaaggtaaaaccgttgcccacgctggcttgtggttggcacggttaatgtttcacaaccgaaaatcgtgaaccggtccttaattgtcatgagcacgaccatcaaaaccatgtgctcacaacccactattatcaagttttagttggcaatttaattaattaaccaatcacgattgaccatcgtgagctatcattaagccatcattaaataatagtgaatcataagttatcccaatagtgtgctaatgtttctaagcatggctaagcaatcatatctaatatctagctgaaccaatatataaatctcaactagtcaagttataataacccaaggtgtcaaggaataaagtaatcaagaacaaaagggctataacaaacaataggttaattccacccaaagacattcgaaaataaatgcaatagttgaatagaaacaatagctttaaacgggatcaacatgttcaaagggttgtttgggatctgtgtgacttgccttgctggccttggaactcttcaaaatcttctcctgcaaactcagactctccgggaacgtcagaatctaaagagaaaagagcaaaatcaccaaaacaccacataaacaagcatgaacagtacatgtggatatttttaacatgtagatctcgattttagaaaaatttagagacttgaaccaactaaatctgagctaagatgaattagttatgaatttttaaagattaaatcggattaaaacacttatatggattttaattgaattatgacgcaataatgaattatttttaaaaaggaaaagaggattattgcatcagcggctagggttcacggtgaaccgggtgcacggcggcggctcacggaaacgaacggccgagatcgatccatccaaaacgaatggccgagatctatcggcccacgaccggtctacgacggacggtgtcgatgacgtcggcgatgacgtcaccaccggcgacggctcgggcgtgcaagctcgccggcgaacgacggcgcggcgacacgaacggagggcaccagcgcgtagagggcgacgcggcgaactcaccggtgaccaaaacagcggcggaagatcaacggacggcgacggcgacgaggaagaagcggcgacgaccttcggcttgacgacgacgatggtgcgccggcggtcttcggcaaaaacggaggacgggacgaggacagcgacgacttggcgaacccgacggtggccttcccgagcgacgacgacaaccggagcggcggcggcgcacggctggacaagcggcggcgatggcggcgctaggctacacggcgctagggctctaccggcgacgagaggcgaaggcgagggtggcgacggatagtggagacaccggcgatccttttacaggggctaggaggcggcggcgaaggcccacggcgaccggcgacgcgatggaaggtttagggttcgggagagagagacgaatccgattcgagatcgaatccggcgatttccaaaggaaattagacgacacttccaaaagagaaaagatagaagggatcccgaggatcatttcccctctattgatttgaccggagatggaaaggggcgacggaattggaagggcggcggcggcgcggctcggctagggttcgggcgcgaggaggacgacgagtccgacaggtggtccccacctgtcagcgggcgagggcgcgcgtgcgcgggcggcgctcggctgtaggccgactgggctggggagagagagagggggttttgggccgactttcggcccaaagccaaaagagaaattttaaaatctttttcaatttaaattattcatgaaatgcaattctatttattaaaaatacttccttggctcaaataaatcctagaaaaatctaggaactatagaatcaagcaaagtatttaataaaattttatctggcccacttttatattggaatttatcatttaaaattagatcttttcttctaggcttttaaaatcatttctaataattccaattaaacaacaatttataaatatgggatttttagggtgtgacaaatatttataacaagatctcacatgattacattccgataaattttaaatttagcttaattttgtgttgcggttattttttcccaaatgttgcacactaatttatttggatgctccaataaatattttctgatgtttgtttagttcattttgcaaatgttgcatgtcgtattatgtatacgtttcagcaagtgttactttatgtttcaatagttacaactcgatgtttcatgtacatgtgctagaaaaatatttcaaaaaaatcaagtctttttaaatatatagtatttatcatactatcttctcttgtgtttcatttgttaagattcaatgttttatgcagtaattactagtgttgcaatgatattaaatattatatctctttgaaacattattagaagcgagttgaaataattgaccttaagtgctgaaacattcttttataaccgatgaaacaacacctttttttaattattttttatcaaaatataatcatgttggatcttattgtaaagatttaattgcaacgaatataacggtgtaattgaattatagattggataaataattgagaagaaaaaatcatttaaagttttctagtaaagttggtttatgatagtatctgatgggagagagaagagagagtagttaagtcaccatgtataaaaataataaagtaaggaagtgcatgcagcagagcttctgctatgtgagtagcacacactaaacccagagcagcgtccgatttttcataatccattggacgtctgatccctagttctctccatcaggatgcgggataggcagcaaaaatcgacggagcatgcgagcgaaccggcctagcccgcggctgcgttggccggggagatggcgagtgcgagccgcgggggcgttgaggtcggcgacgatgtggccgagatgtcgtacttgccgttgcttttgccgtgccaccagctactgccgaacacgttctgactgactgccgacgagcaagaagttctccatcatgggacgctcctggatgcacaattgcttatccaactcctcggattggcttcgtgattgccatcccactccctgtatgctcgacttgtttttcaccggtggccggtcctcgacgtagatcttgtcctcgctgacatatggatctcatagttttttttttacacatcattacaggtggacaagtcaaacaggctgcgtaagtgaaaatctttctcaaaagggccgatggaataattttgcgtgagtttaaatacttggaaaagttaataaagctgttcgtacagttgagtgatacgaattagatataacatatatacgagggaatcaaattaaacttttttttatgtaagtatactaaatatgagatatgtactatgttttccattaattgtcctagaaattcctttacttacatttgtcttcaagttaagttgaaaaatgttgggataattttttttttcgtttttgaacttctaagggagtgcattttcagcctaagcacctcgcacggaggaagcacaaatggtgaaaggatacatcttctgacaggctgcattgtgggtttccactcgtcacacaaaataaaataaaggattagcgcatgattaattaaatattagttaaaaattaaaaatagattaatataatttttaaaagtaacttatctatataaagatttgcaagatatcgtttaataattcggaaagcgtgcgcttgaaaaatgagagagtagaagttgagaaatgagagaaaagaacacaaatctagaggcaaaacactggattttaaggagaccgacctctctaccacccatgatggacctgtcccgtttgagaaattcaccctttcttgataagtgtggtatctataatatacgaatgtttttctttctttttgcagttgccatcatttgataagaaaattgagattgtgctactgtcaaaagtgctttcaccaaaatgacacttcacatcattaaattgccatggtcaaacatgtgttatcgctggaatactatctggacaaaaatacccttatcatttctttctatatatagttagtaccactcaagtcattaactcctataaagcagctctcacgtgaagccacatcatcacaaattcctcataagttgtttgggatgggagggactaaagtccctctcaaaaaaacataagtccctaaaattagtctatcccatccaaacaccacttgagacgttagatttgatctcaactttccaatccaaacgttactgcatgcacgcgtcagagaaacacatatacttgatcagtacctggcggttccaatgcatattgttgaaacaagatttcggcaatactaaaaggggtgactatcaagttgtaaaaatggatgggttaagaaacaaggaattttatacaggttcaggccttcttaatcaagaagtaataccctactcttgtccggagattgatccgccgagtgtattattgatcgtatgatctgggagaaaatcgtgcccctaaaggcacccagacccctccttatataggagaaggagtccgtattacaaagcacagtccatattcctaacggaatagatagttacaaataaaatataattgtaaccgactaggatctcgagtattttcttgacatacaagtttggaatttaacccaagtcctttcaaagatattctatctatacatggcaccccatacccagtcggactatgcatgccgtgtaggtatgggggtatccataatctccacagtagcccctgagacctttacagtcgacgaaataatcttctcttataatccaaaacaaaaatccaagtactccgacttcttctaccctgatctccgagtatcaaaatcaaagactgtgaaggtctgaaaacataaaaaatcgggtgcatcgactagattcacctaattaagtgtagcccccggctatatgattagttaaaaactaaacatatagtcaaggttcgaataacatccaactgagtggttttacaaccaaatgttccaaaaaataacacagctgagcatatgcgacatttaataaaacatccagccaactgctttagctttaatataccaaaaatggagatataaagaggcccgagtaaaaaatactctaaaggtccataaatcaacacatatgacaaaaatcagagtaaaaactctcaaagatccatcaaatgtggtgtaaatatgatatcatgacaattgatgagtcgaaatagcctaggctatgactcacgccataatcaaaacaaacatataacatgacaagagaatgactgttcaaaaaccaattgtcacgcccggaaattcactagtaatttccgaacttatttgtgcataaaatcctcgtccaggaatcagccgaggtacacaaactgacaatttaatatacaaatccatcataataataaccatcataataataacgttacacacttacaaaagaaaagaaaacagcagcggaataacggtctagcgttggcttcagctccactcccacaggcagctcaactggggtataagccaaacgtcttctccttctggatcctttttcttcaactgaggttgattgattattgcaagaatgagcatatgacatactcaacaagccacacagcaaatatgcaagtgcacaaggataccaaaggatggcataatataggctcatttgcaaaagcagcgtttagcaaaacatttaagagaaataaaacagtagagtagttaatcagaaattttaatcaacactgaacagcacacccatgctgcacaggcccgaccatcctgaacaaccatacccagctgtacagatctaacctccaaaccaggaattatccattccaaaccaggagctaagcaaattattaccagttataacatcattaatcattgtgagaggtgtgagactaatcacgaaaaacattgctcaactcgcccataaccgcgggcatggctattcgaatagttttactctggccagaggtgtaccactgtacccacaagacacagcctcaacatcatgtctaccatgcgtcgcgatactggaaagtacccgaatagaggctgtgacaataccctctgcacaacacaactcaccacagtgcaccattcctggatcataatcacccccttataaaacaaggcatggactccccagcgacccccgtgggcttatctccgccacttctcagtctggtgctccgtaataaatcatgttatacaaaaggtaaagccgttgcccacgctggcttgtggttggcacggttaatgtttcacaactgtagctcgcaaaccggtccttaattgccatgagcacgactttcaaaaccatgtgctcacaacccaccattaatcatattttaattaccaattaattatcataacacgattaaccatcgtgagctaccattaagccatcattaaataacagtgagtcataagttatcccaatagtgtgctaatgtttctaagcatggctaagcaattatatctaatatctagttgaactaatatatataaagctcaactagtccaattataatcacccaaggtatcaaggaataaagtaatcaagaacaaaagggccataacaaagaataggttaattccacccaatgacattcgaaaataaatgcacagttgaaataaatagagaatttaaatataggatcaacatgctcaaaggattgtgtttaggatctgtgtgacttgccttgcaataatcggtcttcaattaatcttcttgaatacttccggcgcactcgcgaaccttcgcaacgacggaaacgacaagctaacacgcaaaacaaggaaaagactaataaaaaccaaataaacaatacataaaaagtaaacaaacatgtagatcataattttagatgaattatgagacttgaacggcctcattctgatttcatatgaatttattatgaattttacaagatttaattccaattaaacctattaaatggagactattccaaattaattaaatcatttacaaatgatttataacggagataaaagattaaagcaacctccggaaaagattggatcatatttggtagatgacatatattaaaaagaaataatatgccactgaaaagaggagaggatttatattgattttggacagctgagattaaccttgaccgagtcgactaagatcggatggcttggattgatctggcaagcgagcctcacgagataccgactcaacgagtcaactccacgtgacatgagatcacctaaatgatcaaccgaaaacggcgaacagaaccgacggctctgaacggctctaaactaatggacgactcaacacggacgaatgaacgaagcacggggaacacctcgttcgaacgaacgagcgaacgactcaacaacggctgtggctaaaccggtcggctagacacgatttacggtaaagccctggtacgacaaacgataggccggtaggaacctagggttgcacctacagctacacaactcgactaaaagcagcggctaggtttaagcggcacacagctgcgacacggcggcactaagacaacttgactcggctaggcggcggctaggcggaaacacgcagcaagggttagggtgacggcacagccggtagcgaccatgcacggctagagcaacaaggctgcgagcaaaaacgcaaccggcacggctgcggctgtggcaaagcggcaaacagcggcagcggtagtgatgcatgatagcagcgcggtgacggactgcggctgcgctaagtctaggcctctagggcaacagcgcggcaaagcggcaagcagctgcagctaagcggcttagccggcacacgcgcagcagcggcacggcaagcagctgcggggcaacgtggcaaggcgcgacgcggtagcgactaagcagcggtggctaagaggctcgatagagcgacggcaaaccgcagccgcacggcgtgcagcagctacgacacagcgacgacgacacacacgtggcttacataaacatctaccctaggaatcggagaggaggcctcaccgggaaacggtagcgaacggagaggaagaggcgacggctacggtccgacgacaacacacggagacgatgatgacactagggccaaacaagattagattaaatggaattaagaccctagggataagctacaccggtgaacgacataggagcggcggttgccggcgaaccacggtacaataatgcaaacggagagcaccgggaggtagagaaggtgacggcgattcttaccaacacttacacgatgacgggcagcgacggaagatggccggcgacgagctccgaagggcagcgaggtactgtccacggaggcgacgactttccggcgatgtgcggcgacaacggaggggtggccgggcttcacttcgcagctgcgaatccaatggaggcagcggcgaagcttggcgatgacgggaggagcagcagggcttcgccggagatcaaaacgcgacggcgaacttcgggttgacggcgacgatggagctctggtggatttcggcttcggggagatggctgccgggctccctctccttcttgcgaacccaacggcggcagcggcgaccaaaagcggcggctaaggcggctgctagctgcggctggagatcggaacatgacagcaacccaatggttcatggcgaggacggcttccggcgaagtttcggcgcaaggggaacggcggccggggtggagctcgaccttgcggagccgatggaggtggcggcgcaggaaggaggcagatgaggcggcgtctagggacggctggagcggcgccggcgtttggagagagaaggagagcgcggggacagcgtttccggcgacggcggcggacgggacttgaggggatgggtagaggacgactagggggtcctttatataggcacgggaactcgggatcaagcccacaacgacgggaaaaactcgggaaagtctagggttctcgccggaaaaaggaaggatttgatccgcgaaattggaaagaatttccatagaaaattttggggatttcttggggaaaaggaagaggagattgaggggattccattcccgcaactaatttggaaagaggagcaacggggaggtcggattggtgggaggaggcggcggcactgtgcacgagcacggctggctcggctctgtctggaggaggaagatggagtactgtagcgacagggacgaaaaacagacttctatgcggctgagaggaagggagagagaaggggaagcaaattagacttttcgtcttgggctggctgaaaacaaagcaaagaaagaaagagaaggggggagctcggctgggccgacttgggctgcacggccgtgcacacaaaagagggagatgggctggaaagggcccaagactaggaagaggattattattacttttccaattaaattaatcaatgaaatgatctttgaattgttaaaaatacttccaatgctcaaataatttcaagaaaaatcctgaaaatacttggacactcaaagtccttaacaaaattataattagaccatttgatgattaatttaatatgtgggtaattactgaaatgctctttatatgattaaaattaggaattgagctccgaaaaatccgagaatattccagagagtataattaaccatggagaatttaataaaaattaaatccatccatgctttatatttaggaaattttatttcccacatttaacttcacttgtaaattaatgaacatttaaaataaattctaataatcatttattaaataatttataaatcctgaaacaaaaatcaggatgtgacaccaatcatctaaaaaaaacccagacagcctttgtagcctaaaaaggcttacaaaagaagtataacacatttctgtcgggcacctttttatttgcatcgtaataattccaaggaattatctaattacgtcaaaaaggattttagcagcattggactacactgttgcgagcaagtattgccgaagcaaaatgcctaagtccctaaagatcacaacttaaccacgctgatagaaagaagtgggctgaagtactgtttcgggcccaggcccattagtactcccgataccctaataataccaaaagccaaacgtcgcttcgtcttctccaccgagactctcgccacttttcccattcccagctacagtgcgaaaccgcaccggcgaagttagcatgtgtttggtttgggggcgagatgggatgggttgggttcattcctgatttttgggataggatggtcctatttttctgtttggttggaggaatggagtgaaccctgtttcttgtttggtttgagggatagaaggggatgggatggtcctatcacctatttgattagagggatgaagatggaatagttggatagagatacctcctcacatggagtaggtgatgttacctctctggtacacaaccaaatacttgataaacataaagaggaaaaatagatttgaagcagcagataaaatcatataatcatggccattattgaaatcaatatatttgctgcagcaatacaaatgagaataatctaccgagaagaaattgacaacacagtgcacttgaactatatttttgacggtgaagaacattcatctcatgcaaaaacacacatacagatctcatccagagctagtgtttcctgttgatggatgctgcaagcaggaagggaccatggcaacgcagagcaggaagagacaagagcagtcccgactcttcctcggttcctcctgccgccgccgagcaggaaaggacgacgagcagcaacagctcttcctccaaccgctgccggaaaggatggaggctgcaggaaggaggccgcggccgtcgcagactcacacatacgcgggaacgcctccggctcgcagatccgccaccgccgctgccactgcctgtgcggtgtcgctctgtgggaaaaacgggagggttgcgtgtgacttacatcgggtaagggataatgtcactgcgaggagcgcgtgaggtcgcgcgattgcagcactggcgaagtgggtcggcgccgtccgaccgatttttcacggatcaggtcgacccgcatatgaggggtaaattcctttttggacctaacccatcccagctatcactccaaccaaacacctatgtgaatgggttcgacccaacccgacccaagaaaacccttcaaccaaacacacccttagggttcatcgattcgctccaatccgtcctccaaaattccacagaaatcctccacacgacttatgcatcaatctcctattcattctcagccacattccggatcaactcataccatccagttcgcatccatggcagaagaaagagaaagcttcgaaagctagtgggcaccctccgatgtaacggaggagaacttgaaggagatggtagcgcacggagtccttccggcaaaagagatcatcatgtggcgtccagcatatggtgaaatgttttcgacccctgacacacacgaggtggtggtattctcccatttcttttatggcggattttctcttccaacctcaagattcttccaggggatattggagttttacgggatcagtttgcatcacctaaaccccaactccatagtccacattgccaattttatccatgcttgcgaagcttttctggggattaggccgcatttcgctctacttcgccgcatcttcttcctcaaaccccagaaaagcaaaccatgcgtagtcgggggagctggatttcaactgagaggaaccttgagccaaaaatatttctccatgcctttcaaaacttcgaataagggttggcatgcaaattggttttatgtacaaaatcccgaaccagctcttctcgagtactcctgccttcctccagtgtatcaagatacttggaactcacttccaattggatatgaagctgctcaagcgcttgccctgatggatcgtatgcggaagctgaaggaacagggtctgcaaggggaacagatcacttggcattttatcaagagccggctggccccaatcaaggaaagatctcgcacagcctttgaaattcgacggcaagcacgaccctaaccgtgaagatcctgaatctcttgaattcaaagttatgaaggagagaatgtataaaatcttctcaaatgcaatcgtagtcagctattcgcacttgctgccagtggtgccgtacaatgctttcaaccccctccaccggtatgtatttaatatctcaacctttctcaaaagcacgcttttatcatctacagagttgattgaaaacttggatcatcatgcccaggaattcgccttgatgaagtcagatcctccaattgctcaacgccgctcactccgtcagcaaactggtcaagctggcggaggaccaaaaatccggtctgactctcaacccaacacctctcaatcggctaaccagtcagacttccgcaagaggaaattggttccgagtgacgatgaaaatgacgatgctaaaaaagctggcagcaaaggggtgactggaaaacaaccaaagcaagctaacccgaagaagaaaacatccagtcctcccatgccgaaaatcaggaagtcctccaggtacaaatcatttggcctttctccttgtatcgctgctcactcactattaaaatagcacttatagcataactcaatttgtaggaagccatctgacatagatccttctggaaaaggccctaagccgactgacacagaaacgggtccttcaaaagaaaccgggccgactgccgaagatcgcccgagtgacaattaaccagcaaccgacaatgcagagaccagcaacgagcccccgactggaaatcagtcggccgaagctggagtcggtgctaatcaggagccccagaacaaaataatgacatcccggaagtagagacccaggctgatagccctcctaaaaacgatgctagcgccaacccagggtccagctctcctgttagggtacaagggcatgctcgtccccgaccggaagttataacaggtacacaactctccgaaatctgctttgatctgacaaactttcttcaattgtttcaccattattcatgaatgcataaggtccgatgattggtgacgcagaagaggtcctccggatttgatcggctgaagattctcgcccacccatattagtcaagtggtgggatgacgaaatgtagccgtgggggatcgtaataaataaacaaaaagaagacgaagaagtatgtctgctaaaaaagacactcgcccaagctacttgccttgtaaatgtaagtctccctatatacggcttcaatcatcctgtcagccactttgcttagatacggataaatttgtggtgcagagaatccatctcaggaatgaggcaaagactgcgactcttgaaaaattagttccccaccttggaacccttgaagcaaccagagaccagctgcgtgaagccagagagcttgctagaaagactgaacatgaccttagagatcggatcgccgagcttcaagactccaactttgagctgagcggttcgtcaaaaggtaaacatcgtctctgtctgacttgttttgtgtcgctgtccatgtgcaactgaccaatgaaaagcaatatagtgcaagcttccaagatatccgagctggagaggcgaatccaagctctggagaaagacaaggccgaattggcaaaacagagggactcggctctgaaagatgtcgaaggtactggtattcgaaacttcaaaaaccactctcatcgtcatgcccagtcgttaacgtgaatttatttgcacagatcgcaaaatcaaatcccaggctcagttcgacgtcttagttaacaaaatcaagaagcttgaaggaaccagagatgaagtcgccaatgccgctacgccactcgtccaggcgatgtttttcgataacaacggtccgagttcgcttgatgctgtcgaaatctttgacaagctgagagctgctccagatacatattttaagaacatcaaagaatctgggagtatgggagcaggcctatcgttggcgatgaccaagtccttatacccgaaaattgatattgatgctgttgacggctctgcagacgggacaagtgaggaggccgcccttgacctcatcagtgatgcgcaaaaggctgctgacaagatagccgctgatgtagttgagagattccaggacaacgatcttaagccgactgggtctgataattctgatgatgaaagaactgaatctaattgattgataatgataatggaggcacaatttgtacaatactgataaatttatgctgtgcttgatgatttaaacttagctccagatttctcaaaagttttttgtcaaatcttattgagcctagaacccgcaaaagttcttaaaaaactttcagtcctcattggctaagccaaaaaatcaaacaaggcaatgataaatcaagcaagcaaattgaattgataaaaatcacactccattattattatagtagcccccgactgataactcaagggacaacttgatgttaacagtcaaagaggaggatacaaaagtaatgcctaagcataaaaacgacgaagatgctcgatattccaagagttgtcgatatgagtaccgtcttcacgcttgagtcggtaggaacctggccgaataacttcagaaattatgaatggttcttcccacaagggagataacttgtgccgatcccgtgtagtttgaatttttctcagaaccaggtcaccgactaaaaaagctcgagatcgaacattgcgattgtgataacggcgcatcccttgtaagtaccgagccgactgaattaaggctgcttcacggacttcttccagtcggttgagatcatctacccagtcttctcggtagcgctcctcgctaaagttacgaaatcgtagagattcaaattccacctcacttggcaacatcgcttccgctccatagactaggaaaaacggcgactgtcccgtagcccgactgggggtggtgcgcagggaacaaagtacggatggcagctgttctacccacttgccggcatagggatgcagtcggtcggaaactcgcgcttttattccttgaagtaccataccattggcgcgttcgacttgcccattgctcatggggtgcgctacagaggcataacaaattttgatgccgaagtcctcacataaatctttaaatactccgcccgtgaattgagtgccgttatcagtgatgatccgatttggtaccccaaaccggtgcacagtattgatgaagaaatctctagccttgtctgccgtgattgtgataaccggtttggcttcaatccagttggaaaacttttcgacagctacaaagagatgagtataaccaccaactgcctttttaaacgggctgaccatatcgagcccccaaaccgagaacggctaagacaacgggatggtttgtaactcttgagccggtagatgagtttgtcaagcgaaaaattgacaaccctcacatgttcgcacaattttgtcagcatcggacacggctgtgggccagaaaaaaccttgccgataagccttgccaacgatagttcgtgcggcagcgtgattgccacagatgcctgaatgtatatcctttagcaattgtcttccctcctccaaagacacacagcgttgcaggattcctgacggacttttcttgtacaactcggtctcatgtataacataaagtctgttgtgcctggagatccgctcggcttcatctttatcttgagggagttcttgttttgtcaaaaatcttacgaggggctctctccagtcggcttcaatcatgcttacgtcttgagtgtccgtggcctcgattgtttctttccttggtacggttggctcattaagatgttcaacaaacacgtcggaaggagctgcttctcactttggaccaaaattttccagtctgtcagccgcctcattattgtgtcgaaggacatgggtgagctcaagtccatcgaatttgtcttccaacttgcgtacctcctgccggtaagcggtcatgttatcatcaaggcaggaccactctttcatgacttgattaacaaccaactgagaatctccacgaactatcagacgccgaattcccaaggagattgcaatccttagtccgtgaagaagcgcctcatattctgccacgttgtgagacgcagaaaaatgtatccacaatacgtagctcagcctctctccagttgaggaaattagaacaactcccgctccagcgcctgaaagcctcttcgacctgtcaaaatgcatagtccaatactccatcttctccgcgggcatgtcttcttggcattcagtccattcggcgacgaagtcgcctaaagcttgggacttgatcgaagttcacggcttgaaggatatatccaaagagatcaactctaaggcccactttgcgatccgcccatttacttcgcgattatgaagtatatccctgagtgagaatgatgtgaccaccgtgaccgagtgaccttgaaaatagtgggataatttcctaacggtgattagaacaccgtataatagcttttgaacttgaggatatcttgtcttggagtcggccaaaacctcgctaacgaagtagattggtcgttggactttttgaacattgccttcttcttcgcgctcaacaaccaggaccatgcttacaacctgggaagttgccgacacgtataacaacagcggctcttgcggatgtggtgaagctaagactggtggagtagtgagaagttttttgaagtcttcaaaggctttttgtgcttcgggtccccactagaaattgtcggttttcttcaatagcttgaaaaaaggcatcccctgctcgccgaaccgtgagacgaaccggctgagcaccgccatgcagccagttaacttttgaacatctttctgggagctcggcggtttcatgttgaggatggcgttgattttctctgggttggcttgtatgcctctatgggacaccataaatccaagcagcttccctgacggtactccgaagatgcacttttcagggtttaatttcatcctgaaagcgcggatgcttgcaaaggtctcttctagatccataatcaaatcatccttctggttggtcttgacgactacatcatccacataagcttcaacgttgcggccgatctgagttgaaaaacatctctggatcatgcgttgataagtttctcctgcgttctttaatccaaaaggcatggtgatgtagcagtaggccccgaagggcgtgatgaatgaagtctttaagcagtcggattcccttagttggatctgatgatatcctgagtagcaatccaaaaaaccgagtagctcgcagccggccgttgagtcaactacctggtcgatgcgaggtaacccaaaggggtctttgggacaagacttgttgaggtcggtgtaatcaacacacatgcgccattgccccatcttcttccgaaccaggactgggttggccagccagtcgggatgaaggacttccttgatgaagcctgctgctaacagcttggtcaattcatccttgatcgcatcattcctatcctgtgcaaaacgacgaagtcgttgcttgattggtttagcgtcttccttaacatgtaaagagtgctcaatcacctctctaggaataccaggcatatcagatggtttccatgcaaagatatctttattattttgaagaaaggtgatgagcacgctttcctatttacaatctaactcagcacctattacaacagtcttagtaggatcagagggatctagaggaatcttcttggtcttggcgtcgctttctccgctctttggcatcttggtcgtaggcacttctccttcgcttgctgtggacgcagccagttggatttcttctcgggcaagcgtgatctcgtgggtctgggccatctcgcagctttccttatcacacgtgacggcttgcttgatgtcactccgcaaggatatgactcctcgaggaccaggcatcttcatcatcatgtaggtatagtgcgggacagccatgaacttggctaacgccgggcgtccgagtatggcatgatacgctgtctcgaaatcagcgacctcaaaacaaatgttctctgtagggaagttctcccgagtgccgaaagtgactggaagagtgatctggccgagtggtgtagcagatagccccgggatgactccgtgaaagggcgcattactcggctttgattatgtgcggggaatctgcatgtcgtctagagtcttagcgaaaaggatgttgagtgcactgccaccatcgatgagagatctgcgaagcttgatgttgcgaaccactgggtctagtaccagggggtaccgccccgggtggaccactcggtctggatgatccgagcggttaaacttaattgttgtctctgaccaccgaagatattggggcgtgtcgggctgaacagcgttgatctcccgttcggtcagcttttgctttctcttggattcataagccaggggtccgccaaagatgtggttgagttccttgcgatggtcttgaaaaccagtcggggcatcatcttcatcatccttcttctttgacgtgctttaatctccgttagaggtcttgcgtgtgttcttggcgtattgttctgcaaactgtttgtagacgaagcaatctttggccgcatgatttgaatttggatgatgcggacattgggagttcatgatcttgtcaaaagtgttgacgcgtgaacgttgtcggaaggatggtgtagtagttgccacaagttcctcgggcttacgcttgcgatccttgtgattggaacttccactccccctgtagtcggcgtatctttcttcggcttccaagtggtgcccgactgcttggacgcggtaatggcatcttcggctttggcgtactcattggcttttgcaaacatctgcttgaccgtcctgggaggcttgcgcccgaacttgccgactagatcatcgtggcaaatgcccttggtgaaggcggcgatgatgacgtcgtcggtgatgtcgaagatcttgttgcgttgctcagaaaagcgtcggatgtaatctcgaagggattctccagacttctgaacaatgttgtagagatcaaactgtgtaccagagcgttcagaggtaccctagaagttggcgatgaagtggtcgcgaagttccacccaagatccgattgtgccacggggtaacctgtgaagccaggatcgggcagaatccgctaaggccacaggcaaatagtttgctatggctttgctgtctcctcccgttgcgcgaattgcgagaccgtagacgatgagccaagactccgggttagtggtgccatcatacttctcgattccagtcggcttgaagccggctggcaaatccactcgacgcaggtcacttgtgaaggcagcaactccatccacgtcgtcgtcgtagcgatctggtgaatggtggggaacgtagcctcttgccgcgcggcgctggttgatagtatcgcgaagatcgacggggcgccgacgatgtggggagcgaggtcgttcaactccacgctccctgtgtcgttcgggaggcgagtggatagatcgcttgtcgtgacccctgctcctgcgactggatcccgcgccgacgacgctgaggcttggttggcgatagtcttgagatcgaatagggggaactcggctgccagtcagcgtgcggacgctttctgagttaaccgggaccgaggcggcgatcatggtcttggtctagttcaagatgttgacgacgtgattggcttgattgagtgcgtcttccttgaggagggtgtcgaggagggtgatcgctgcaaccgcgttctgttgaggggtgcgaaaaaccaccgtaccctcgacgtcttgctgcccgataagttctcgtgctcgtcgcccggcatccaaggcatgctgtcaccggtcctcagcgtcttttgcagcccgttcgcgctcctgttgctcacgctgcagctgttctcgctctgtgcttggcgctcctcttccatcggcgtcgttcggcttcctgttgcacgcgttgttcttctgcttctcgggctttgcgttgttcttccatctcgttgtcggccataaagatgccgaattagagaggcgtgtagttatcttcaaagtcttcgtcgaagtcatcgaggttgcggtagtcgtagcggtagccgaagtcgtcgtactcaatgatctccgttggccgtgagtcgacgctgggggagctgaggtagccatccagttgttccgtcgaaaccgtgccgagaggttggagtatgacgccgacttccctggagctaggctggatcaaggccgagggcggatcccgcctagacctacggggagaagacgcccttatggtgaagacagcagccaaatcatcggggagtttcatcaggattggcggataggccccatcgtcttgttcgggtcgtgctatagtagattggatctcgtccgagtggtttgaagccaacttggtggagatgatcttggggtagatcttggccgagttcgggatactgaacggggtggagatctgacctcttcccgattgtttcgaatccgagttgaggagagaaatcttgccgaagtcattggtgatgaagtcgaggctgctgaaccggaacgcctgcccgggagggaagacgaagtcgtcgatgcaggaaacgaaacccattgcactagtcgacgaagaacttgacgcaacccctacctagcgcgccaaccgtcgaaacaagatttcggcaatactaaaagggggtggctatcaagctagaaaagtggatgggttaagaaacaatgaattttatacaggttcaggccttcttaatcaagaagtaataccctactcctgtccggggattgatccgccgagtgtattattgatcgtatgatctgggagaaaatcgtgcctctaaaggcacccggacccctccttatataggagaaggagtccgtattacaaagcacagtccatattcctaacggaataggtagttacagataaaatacaatcgtaaccgactaggatctcaggtatttccttgacatacaagtttggaatttaatccgagtccttttgaagatattctatctatacatggcaccacatacccagtcggactatacatgccgtgtaggtatgcggtatccataatctccacacatatagcctgcttaatcttccaattgattgtggaaacatcataaacgattcatgtacaaaccatcaaggatgcaagaggggattgatcctttactccatagcatacctccgtctatactatatatgcatatattgccagatatcattcatttatagcatgcatctgttataagtcctctatatatgcatatattgccaccggatatcattcatttatttatagcatgcatctgttataagtcctctacacagattgattatccatccaggactccatccctgaagcttcatcaagaatatattcagcatcaatgtaggcgattggcaatatcaatgatcaatgaagccgattggcgatacgtgagcaccctgtctctattccaatcccatgattcttcttgattgatgttgtgcttaactgttccttttcttatctcaggttaagttccatagagaaattgctaggcaatgcatgttgttagtacatactacttttcacccttcaggtctcatatgattttcatgactaatcattatagttcagggaacttaactaaatagggtatatgctttctatttgcagaaatttatatttcccctatgttcttgaagggtgaatgttcgattatcctaaacatttatcctttcagatagtcatgttagctactgatctaagtgtaatctttttgtcaaaatcattgaatattaagaattgtaatgtgttctgagaaacaaagagagttcaagtgtttctttatacatacctctactttttgtgttgacaggtatttttgaaataagtccacagcaacgcgcggggtattaactagttcaacaactcaccgatgacaatggggaatgacagaaccttgtcgtgaccgcgcaactcgcagtgctcacgctatgcctctgctcgggcccctcgctctctgcttgtgctttctgtgttgtcctcctcgatgttcccgcttcttaccccggttgctacgatgggactcgagaggacgtcattgtggggccagaagtggaggaggctggccaccgtgttgagttgtgatccaaattcatttgcgcttaataaaggccagcttctgccggagcgaagtggaggccctaccagaggctggccggatcgtaataccttttagcgtttcgcctcatatatatacctcttataagccgccgtgttgcgttgtaacctcaccccgatatagtgaagatattttgctggctggcgcccgtggttttttttctcttgttttgggagggtcttccacgttaaatctcatgtcttctgtgattgatttattgttgtttatcgtttgtttgcctatcgtttcctaacacaccgcactgggcctcaaggaaaccgcggcaattcagcaggtggaggatgccaaccgtagtgaatcaagaggtgaggggaatggtcgcatctttttcgcccttgctgggaactcaacaacgactaggccagcggcgacgccatggaatgcgcatggggaaagggggcaggggatgggggtgtcgcacggcgcgggtggtcctgctcatcaactcactgctcgatgtttccatccacactaccccttcatcactggtgaaactcccctgttccctgtcgtcgcagcaagcacacttgtgtgggaaggcaagaagatatgcaagatgaaggcaagggtaatttcatctaagagggtgtttagatccagaggtataaagttttagcgtgtcacatcgagtattatatagggtgtcgcatggagtgttcgggcactaataaaaaaactaatttcagaatccgtcagtaaactgtgagacgaatttattaagtctaattaatctatcattagcaaatgtttattgttgtaccatattatcaaatcatagagcaattaggcttaaaagattcgtctcgcaaattagtcacaatctgtacaattagttattttttaacatatatttaatacttcgtgcaggtgttcagacattcgatatgacagggtataaaatttttgtgtgtgaactaaacaggacctaagttagcattctagtgagcacgcacaatttaaaagtggcaatttagtgaaactcatatacataatggcattttgtcaaaacccgcttttgacaatgcataatctcaatttcctctcagttgacatttgtcacctcctatagcccttaaaaaaaccattttgcccctaaaaagggaacatgcactaagagcaagtttaatagtatagcccactactagctccaattcatctatagccaattcatacaatagttgcttactatactattaatatatggtcccacctgtcatacacacattgcatcttgaagtccgcgctgcagctggctacaaatctgtagcccgctgctcttctctctcatcttttatctcattaaaatatgtttacagctggctaatagtctgctattgtacctgctctaaccaaacaggcacttttttaataacatattgaaacaatagtagtagatttaactgcattatttataattgcagtagatattgcaaacctctcgagggaattttggacattatgaacaaaaatcaaagagctaactgaggttaatcgaagtgacagaaaaaaaaagaagaaagaaatgtactggtatgatggcatattttagaatttctgctagtcgatggcaaattgcagatattcttcttatcccactataaatatgccattttagttaaatgtcactactattcataatattagctatgtgtcattggaatttgaggaattggaccgtgaatagtagtggtggtatatttatagtggcatggatccaattaaccctagttactattctatacagaaggaaatgacctcacaattttaacagacattatctcggtaattttgaagcctgaatccgtccagcaaggttctggttacgatgatattctgcttaaattaaaattcttaagccgactatatatcaacccaatctttcaaagggacttacaagaataggatgtacgtgtgtgtacttataacagaagagtaagtacacataagttatgagcgcttgagtttgttatgtttttcttaaaagaaaaggagaaaaattttagtatatgtccaaagttcgagagcgaaatggtactcacgaacggcatggctacagaaatacgggccgcctggtgggccgagcaaaccgcagccgtcggatccggcccaacagcgctaaaccctagcccgcggaggcacctatataatccgcgacccaagcgtgagaggcgagagagcgaggcacagctaccggcggcgcagccacacagcagcagcaggtgaggaggagaggagacccgccgccgccgccgccatgggtaagacgcctccttcctcgcccacggccaccgccgtctcctcgaacgctcccgctcctcctccgcctcctactcccggtcggtcgctgactcgttcgtttcgttcctctcgcaggtatctcgcgtgattccatgcacaagcgccgcgccacgggcggcaagcagaaggcatggcgcaagaagcgaaagtgagtgccccaatcattccccttctctaggtttctcgcttgtatatcttagttttagcgggtgtatttttagatcgagcccctctgttacgatttgtatgatctgtgtgggcgcgtgctcgagggcgcagcttcgttagatttggatcttgttcgttcaggacttgtggtagaaggcatcagcgtgtgtgattttgaacaaggctgagacttggacgcatcgttttacctaactgtaattttcgcatgttttgtgcttgatggctggagtagtaacagataggtcatttttcgaaggaattgcaaaatgaactggagatgtttttttttggcttataccatttcaaataccctatttagagattcagtggtggcagtatggagaacatttccaagtttagatgattgtagtacgctttggagttcttgaaccttttgtgcatgttttatttggcaatatcttagtactgttttatgtaactttattggccatattacttctaaacttgatgctggctgtgatttgagtatgttgctaaacgtgcatttgttctgttgtatgttagttttaatttgttctctcactttgtcatgaaggtatgagctcggaaggcagcctgccaacaccaagctgtcaagcaacaagacagtgaggagggtgcgtgtccgtggaggtaatgtgaaatggagggccctccgtttggatactggcaactactcatggggaagtgaggccgtgacccgcaagacccgtatccttgatgtggtctacaatgcatccaacaatgagcttgtcaggactcagacccttgtaaagagtgctattgtgcaagttgatgctgcccccttcaagcagtggtacctcactcactatggagtggatattggtagaaagaagaaggctcctgcagccaagaaggatgctgaggtatttttctcccttctgttgtacattttgatgtgattggtatagtagattcttatacacaattatttgtcgtcttataacttaagcttggtatcactttcgtgattggatgtatagatgcatattgaaagatctggactgttgactgtattgtccctagttacaagaattggactgtactttgcttatagctgcgtgcagttcttgaattggtatatttatgttttggtactgcagtagtatatattgtattctgttcacatgtataaaaccagaatgtatctactctttagtagcattttacctgtcctgcataaatatgctacctgcagcatgcacttggtaaaatccggtgcttatttataggattatatgttatgcttaaggtatatattttgcttgacggaaaagtatcttgtctataaccttgcaatgcattgcttgccggtaatcctttattcatgataataggaattagcatcaccaattttgcattcctagttgttgtaactctgggagcaactcttttagatttatcaaactgtgttcagacttgttattcctgtttacagattgactccgtaggttgtctttgagctgtcatatcatttgatccttcattgttgaatttacaggggcaggatgctgaagctaccacagaggaagcgaagaaaagcaaccatgttgtcaggaagcttgagaagcgccaacagggacgcacacttgacgcccacatcgaagaacagtttggcagtgggaggttgctggcctgcatttcttcccgccctgggcagtgtggccgagcagatgggtaagattccaacactgaatgaacatcattgtaaattaggcttttctcacagtatatgtcagcatggaggtggcatgatctcgagtatgtcctggtttgcaggggctcagatttctttttgttgattatagtgcagtctggaagttaaacaaatgcaagaataataacaatgctatctctaattaaaccatttattttataattccttgcagctatatccttgagggcaaagagctggaattctacatgaagaagctccagaggaagaagggcaagggtgcctcagcttagagcaagtctttctttgttgctggttctacactgaaagaactacccttttttgttccctgagagctcctatgttatgtttgcagacgcatagctgtttttttaggattaaacaactttagcatgatgacatgagaatgggttatgtactctggatgttattaagttaaaatatttactttctgccagctcgttcataattttgacattatcgatctgtcgtgatctgcccattatgtttgcgcagagttgcattttgttatctactaaaagcctaaaaggatgtttgatcggactagctacgcttcaggagtgtactccctccaccccagaacttgactatcagaatcaataattctaagacgagcggtcggttgtttcagagatagtatagctactttcctttattggaatttaagtttccaacatctactttatttaaggggacttatagaacatttaaaaatcatttgttttattaaaaaaattatataatcattatttattttattgtgagttgatttatcatcaaatgtttttaaagtattattttttttatatatacgtaaaaattttgaataagataaatgaatcaatgccgagtattttatcttataatggtgattacggcgtttggtggatcgccaaaccacccaacacagtaatgtcaggataaaaaggaaggggatattcatgccatttcctgttcttattttatggaaataaattaggaaggggtagtaatgttattttctgttttttctccctcctaataaacatttatggatcattggatatattattttttataagtttatcaaacttatcaaagtttgactaaactttttataatataaaaagagtggtaattaggtttgcgagggagagaacactgagcatgggaggtgggacatgctaattcaaactagatggagagagagtgtcatggttacggataagacatatatcctatcctacgacttacggaacatacaagattggcataccatcattcacatgatatacataccatcattcacatgatatatttcagtatgcgataaggaagtatacaagatattatagaaaatatcctcacgagctggcgattgacatagtcctactcgaagaggattggattgattctatatcgtgcagggttcattttctacgagttctatttaaagactaagataatcatggtataaaaggcacaccccctgagaggttcagatcatcaaatcttagtactaacacacccaccatagtttacaaagccggaggacgtgaagccaaattcgccaggagatctcgtcgaacggtctcgacaaggatctcagcagattcatctattcttttgtactctgtgattttctatatcaatctcatgtaaactggattaggactattacctcacaaggggcctgaaccattataatccttgtcttttgtttgttttgatgtcgtgtcatgtagatactcgtaccaacgtatcctaataccctatctatccggtctccaggtatcccacatcgatagaaacgtctatgggttttccggctagctccataaggttgtgggttagacgaactggattcgaaatcttaccccttctaattaattgatattatgtacttccctaatattcgtgttttgattcaaactagatgtagacagtgcatcgttcacacatatgggagaggcattttggtcattctaaaaatattcctttgtccaatatgcttagaatgataagatatttgacatggtttcctatagaaaattaccatatattttttatattcttataccaaactacgtttgatgtgtaaattagaccattttatagatatcttgtagcaaattttgttcagtaccgtatttttagcaaaactgaattttaataatccatcaaaataagtgctatttatcaattgaattatcgaaactaatgaatagtgtgacgtattgccgaaatttctcaacgtataggtcatgaaattggcaacgaagaaaaaaaacagagagagagagagagagaagctttagccaaacaaaattctgccgcttccgctcaaacgaaatggcgatgataacgctgccagtagctgcccacgctccgtcgccatggcttccgccctccatcctccgcctccgctccacctccaccaccaccaccatccccgccgccgccgcaagatcctccgctccccaccctctcccggacgagctccacctcgtcgccgacatccgctcgccgcacaaccacatccgcgtcgccgacgtctcccgcaccgcctccggagccggccaccccctcgccggcgcgcgcctcctcctcctcgacgcgccgggcaacatccactccctctccttccctcgctccccctgccccctcacctccacctacctcgacgtcttcgccacgctcccgccactcctccccgcctccgcctcgtccctcgccgtcctcggcttcggcgcgggctccgccgcgcgcgccgtcctccacttcttcccggacatctccgtccacggctgggagatcgaccccgccgtggtctccgcctcccgcgacttcttcggcctcgcggagctcgaggcggagcacgccgcccgcctctccatccatgtcggggacgcgctcgaggcctcggccgacgccgtggccgtgcccggcggcttcggcggcgtgctggtggacctgttcgccggcgggagcgtgctcccggagctccaggagatggacacgtggaggcggataggccggcggatggtggcgcccggagggagggtcatggtgaactgcggcgggccgtgcgtggaggcggaggaggaggggaggggcggcgaggccgtcaaggacgcaaccctgcgcgcgctcacggcggcgttcgggcacgggatggtgtcggtgatggatatggacgagagctgggtggccatgactggaccggcggtgtcgtcggcgccggaggaggcggcggcgtggaaggctaagctgccgccggagctacggcgatatgttgatatgtggaggccgtgcttgctgtgaattctgaattgaattctctgaataccgtgtgatttcggtaagtgaatgcacatatatcttcttgttccagttacattttttgaaagttagtcacatagcacatcaaaaacagatgaaattgtccggaaaacaactgaaaagctaatgttagcaaagcgacccagtgaaatcggtggttctgtatgggtcacagctcaggtgatgaattgatctatgtgcaagcgcaagacatagaggcatgcttatcagcaggaagttgaattcagatggcgtgaacttgaaatgaaggcaacacaaatttttaagatccatgtcttagatgattttgatgtggaggcatcaactaaaaaggctttaaaagtctttgtttttcgtactgtggatagatcaacaggtgataacttggatgtccttcgtggtactcttcaaaacaatattagaggtaaaagaaccctgcttatccttgattgacatcggggatgatgttgagggaagattggcaacggtagaatatgttctggactccattcacagaaattatctttaaattacagaacggcaaagccattgccgccaggtgtgtgtaagctacaagatcacactggcaaagatgagttgttgctgctgcttacatctttctatcgtgatgtgctgcccacacacctataagggcatgtttgcaacacaaggaaacaaacaacagaaaagaaaacgctaggaatatagaaacacaccaatgtaagcgtaagacacagaactaaaaaaagaacacagcaattattaataggtagaaatcatttaaaccactatgccttgtttgtttagacgtgatagactgggatttgggcccgatccacagggaacatcccctgttttctctcagcctgtggacacgtttggatgagtcaggggtggagaaaatcctggcccaatccatgcacatccccgtgggagagaaaaatctccaactaagcgtgtttgtttagtgtgcatgctaagaatgactaatttttctgaggaaagaactttttttttcaaaaggtgctatcttaattagtcttgacaactaattgcactaccacattactacatatttatatatgttcgctgctttatgaactgtccagccgcaattatttgctttagcacttgtttgattccttttttttgtatgtccattgtccactactataaggctacggaaatagtttagaaaataggttcagccttttatttgtcaatgaaccaactttttgaattttgtagaacactataaattgggagccttttttatttcagtgagtactatttgtaatttatggcttgcttatatgttgactattaatgcatctttattttggaaatgagtagttgcagcattgtgtttatgaaaaattagatgtttgttctgtttttacaattagccgttggaatattctggtggaaactttcagtgataggttgtccttggcttctgatgatcatatgctagttagctgctagcttccttttctagctatcttggtgcattctgtagaagaacattgcataattgcatcttgttccagtgtctggatagtagggttaatcttgcttcccatgctgtgtcaatttgtgggtctttgtgtgcatgtgctctgtgaccttgatcagggccaagctgcagttctgaacctacagttttaaatgttcagtagattagttatcttttgattctagttcattttgcttcttgtttagtttacatatattagcaagcaccgttatctaatgtctaagacttgtttcttttggcttcgtagttatagggtgtgcatcatgctagaattgtttggaagatagaattgtgagagactgcttgaattgtaaatgagatgcataaaggacattttttctaactgctccttaattgatgtagctatgatggttccatgaaccaattttgtctatagaattattacctttgagttttatctgggatttgtacatgatggctaaatttagaatgccaaagaaatttgtttttgctttgtacaatggcaatcgggactttggagagtcttattttcttatcagataagatatattaagttgtagggacttgcttagaatcgagtgaagttctattctttcagttagctcaaagagctactagtatttctgatttgaacaaagctgctttcatcgaattctagttgaagcattgcaattaattggcacttcttcccctattgtccagtctcagaattggggatctgtgttttatttctttgtgggtaaagaatgctattatcatattctgaagtaatctagtagctcatttgtcagtgctatgtacaagtataactgtgcaaaatattattgaagtgaaacatgcggtgcattttctttataaactacatttgatttcttttaaacttcataaagttgagattcagaaaaggaagtcaaagaggcaatttttcaaatggatcataactcctccttaggtccagatggctttcctgcagagttttatcaggtcttttgggagattgttaagaatgatctcatggctctatttagagaatttcataaagggacattatccctttataacctaaactttgggatcatcgtgctactgccaaaaaaggctgatgcaaatcaaattcaacaatataggcctatttgcctactgaatgtcagctttaaaatttttacaaaagttggcaccaataggattacaacggttgctcacaaagtcattcgcccaacccaaacgacgtttttgccagatagaaatatcatggaaggggtggtgattttgcatgagactgtccatgagttacacacaaagaaaatggatggtatcatattcaaaattgactttgaaaaggcttatgacaaagttaaatggcagttccttcagcagacattacgaatgaaagagttttcacaatcgtggtgcaattggatttccaactgggttaaaggaggaactgtaagtgtcaaagtcaatgataatgtaggaaaaaatttccggacatgcaaaggcttgagacaagggagtccaatgtccccaattctttttaacatagtggctgatatgttagccattcttattgaaagagccaaagtcgatggccaaattagaggggtaattccacacttagtggatgatggtttgtccattctccaatatgccgacgatacaataatatttcttgaacatgattttgaacaagcaaaaaacatgaaggccattttttgtgtgtttgaacatctctcggggctgaaaataaactttcataaaagtgaaattttctgctttgggggagccaaggaaatggaggaccaatatagacaactgtttggttgtaattctggttcctttccattcaaatacttaggaatccccatacattatcgaaaactcagaaattctgattggaaatgtgtggaggataggtttcaaagaaaacttagcacatggaagggcaaaaacagctcctatggtgggagattggttcttcttaactcggttctttcgagtcttctcatgttcatgttatccttttttgaaatacctcgaggtgtacttcaaagattggattactaccaatcgagctttttctggagcagtgatagctagaaaaagaaatataggttaacaaaatgggattatatatgccggccaaaagatcaaggtggactgggtgtcctaaatcttgatatcatgaatagatgtttgttgagcaaatggctattcaagcttcttaatggtgatggcctatggcaaaaccttttgcgcaacaagtacttaaagggtaaacccctatcccacatgtcacacaaaccaggaacatcccaattttgggctggcctaatgaaagtaaaagatcaattttttcagtatggatcttttaatcctggtaatgggatggaaataagattttgggaagacacatggttgggcttgcaacctctcaattatcaatatccttctctgtacaatgtggtccgaaaaagacattctactttggcagaggttatgagcacaacaccgttgaatgtttcattccgacgatcaattgtaggaccaaagttagttgagtggaacgatctgatctctcgactagctaacataaccctgtcaaatgaaaaggattgctttatttggtcgctacataaaaatggccatttttcggtcaaatccatgtataatgcgatcatcaattccaatgtaagaatccacaagaggatcttatgggagggaaaggtaccactaaaaatcaaagtatttatgtggtttcttcacaaaaaagtaatcttgacaaaagataatctcataaagagaaattagaggggaaacaagtaatgttgtttttgtaatacacaagagaccatccaacatcttttctttgactgtcatgttgcacgttttgcttggcgatgtgtcttctttgccttcaacatcctccctccccacaatgcaaaagatatttttggtgactggctaaggggagtgcctagactcacaaaaaaaatgattttgtttggagctagtgctttatgttggtcaatttggcgttgccgtaatgatatagtttttaaccataaaaaaatgcctaacatcatgcaggttatcttcatgtgttccaattggctccactcttggtgtatgatgctttcataggaacaataggatactatgcacaatggtgctacacgcttagaattagtagccagggaacttttattccattttggatggcgtagtacctacagaatttcgtgatagaatctacgtgattttgaaaaaaaaaatatattattttagtagatcatatcatcggcagaagttgggggtttgtcccatctcgccttttataacttttctgttcacgtctgaattttttggctgtgtgcctacggcagaggccggagatgtaacacatttccattatctaaaaaataaagttgagataaaaaaagaaagcatttcatgttcaaacagctaagagggagagacaattaatcatgaatgttcattgcctactggatggtggatcatgcctaatcccaatcgagggggattggatgggtgggtgggagggattaaattccaatgtgcatgttttgagccctacagtgtttttcccacccaaatagtattctaattccaaaggttgctctatctttcctttgaaaatcccttgaatcaaactttcattcctaagttagtgatggtttcagcgactattttgctctccaatatattcacgcatcaaaatttcttgctgccaataatgggaacaaactcgtgtagcgctcccctgtgggctgtggctctactatacctatactagcgagttgtgacaggtcacctgcctgcctacgttttgcgaggattcttgtgctcatcagttggcaatgttctcttcgacaagagtaacctttggaaaacgagttgcacggacgcagccatatgcttctcggacgccgcaagacaaagaacaaaatggacatcaagtaaaaatgtaatttgtattacaatattataataataacaatgcactatttatctttgacatcgcggcaacacctcaaagacagtaaataatagtacaaggcaaaccaccccagggccaacaatgacttgactaactagtataaataattataacaacacagactacccctagaatcttttggtagtgtacacggataattcgcctctgaaaagagagggatgtgcacagcacgacaggctgcatcaaagaagcgcctggagcggccacattttgctacatatgctacaactctcgcctatttacacagccggtgatgtaagcatgtcagcggtcgtatggaaattcattgtcatcttctatcaccttgaacggctctcggtggcgaccggagcagtacaggttccacatcttgtagtacgcacgttcaaggttgcgtacctgaaacagtttaggtaagaaatcaaatccagcaaccgtaagaaccaatcaagattcaggaccttcgtctaggtaagaaatgcgtccacggcaaatactaaggtgcgaacttacccatctagctgtatcaaataatgggcaagtcatacggacttccttcaacttattagtcagagcttgaagttttgccggatttagtgcaaggtctactgccctatcttcatactctttcatactgatagaaccaaaagggaaaaggcaggattagtatgacatagttaactgcaatttaattagatgggttttaatctacacttgcctgctgacaatcatctcttcccctagcccggtggctaggcagagggaaccagctactctggttgccattttctccagtggaagggttatcattggtaaaccagcccacaatatgtctgtcccagttgtgtgcgcattgcagagagggctgactcaaaataaatcacacaagagaataaactaagaacatcgaatattttgcttgtgcactgaaagaaaaatgaaattattgctggtagaaaatgcatacgtgtccaggaaaaggtctgccaatgagctgcgtctaatatgctcatttttcatagcaacatcagtgaagatgatctggtcgggtctgactcctctcgcagcagcatctgcaaagtcattttttcatagcattcagcattataaagcggaactctacccttttcttttttttcaggtggaattaacacttgaaaagtgaaaattacttacgtgctcttactctagtttcacctgctgctgggaaccttaaaagccataatgcactgttcggaacacgtttgagaatattgcaccttcataattacaaataagggataaagattagtcagatgacccataggcccataacaaattctggtccatcagagcttctacaagaatcatatacagagcagaaaaaggaaaggaagatgtaaacagtgccattaccatgtatcaaatatttctggatccatcttataaagctgattaaagcatgcaaagatgaacttatcctcgggtaacccataatctgatcttttatgtgggcatacaggatcaagacaatcacgatttttctggcagacagattttaagtgtcaaaatcaaagatgatatgaatgagaagggcaaaagaaaagatagcatggcgcacgaacctgcttgtagtcattgacaaaataacaatgaggcagatggacgagtttctcagaatatatgtgtgaatagcaagttggcgaaacaaactgcaggatcatttataacttgtaagaaaccacactcaaatcaaaaatcactgaataatgtgtagtcactcctatcatacctcatctgtaactaggtagtctatatatgcagccccagttgtgcctggaaaccccatgtacgaaacctggatgggggctggttgcagtgcaaaaatttcattcctggcaccctgtttaaatcataagcatagattttagtagtaaatagcaatgcaaaagatcctagtagaattgatgtaagttggccttcacgcaagaaaccaaaaaattccataccgcgtactaaggatgaatgatgcttatatttaatagcccaagtctcaactttacaaataattatatagaaaggccgttaatgtcctatgggatgtgtaattttccaccacaatacttagttaaatatccatagaagagcccattatggcgaaggaatacccaataagaatcaaagggcgtgcaatgggaacagatatatattcataagcattgtgtattacctttgtgtaaccattaaggtttattaatatttgtattttgtcttgattaatgattctggcaatcatatcagaggtcatggcagacacatccacaaaatgctcagcctcagactgaatacgctgcctccattcagtaccatcattttgactcagcgcatagcagaagacctgttgcgcccaaacatgagttgcacatgagatttcaaacatatgaacaatatgctagagagagagagagaaggtgaaacaacctcaacattgtcacggtcatgcattccaaatactgaacccatgagatgggagaggggatgattcccaaaatcgctgctaacatatctgaaatattaacaagggaatcgattactatgctattaggagtccttcagaagcaagacatgcaagatttttcgaatacatacccaacccttagtcgacagtgtttaccctctgctttgacaggaacaggagggggatgcacaaaggacggcaatccaaaacgagaggcaatcaaggaacaatgagcagcatatttacagctggtaagtaaaaatcaataattaatgagaaaagttaacaagagaatattcattaatgatggaaagaacagcatgacataggtccacaccttatctctagtgcaagcatgggatcaataggatatgcgatggcatggaaaggttgcacgcttggaagtactgacatctacagataaacacatgaaatatataggttgtggggaaaggtcatactaactcagtttaataattgaatttgattgtttattgtaaaaagctcacctttatttgctttctgataatttcttcaacatcgcgaaacatggcattcctgttttcccaatcacacacacactgtacaaaacaaaacaaaaaaggttacaaacagctatggaagattggaagtcattagcccgaaacaacatagagtctacaaccgaagtaaaagcagatattgcagatagtccaagaacaaggacagactacctgaactcataactgttgaatgataatgaacaagtttacactaatttgcacactagacttataaatagcgcaacgaaaaactagacctgttaggataaagtactaagtgcattctgttcgtttattgtgaaacaacaacattactccctccatccacaagagttgtgcgcataacatttctcagtttatccacaagagttgaacgtattttgtttgtgcctcgaagcagtaatcgtatggctgcggatggattaatttgataacgcggcccgagcagccaaccagttgagcatgcacatgcaattggcaaggcaactgcatgcatgcggcaccagtgcacgagggcggggctgttggttgcgtatgcgcgatatgcgggaaaaacgaaacgacactgcgtatgaatccatatagatgaataaatggatcagaggagttagtgttctccttggtcactgtgaaaaaagttatatgtacaactctcgtggatggagcgagtactaggtttaaggtaagtgatgaatgttcctatacagtccctctggtcacaggtaagtgatgttttggacatcaagaaggtaaaatgcaactttgactgctaacttatattgtataccctctgttccatatcataaggtgtttagttttgtcctaagtcaaacttctctaactttgaccaagtttatagaaaaatcaaccaagaaatatgtctcaatagtgtatttatttggtattttagatgttaattattttactacaaacttggtcaaagtaaaagaattttgacttacaacaaaactaaaacacaatacaatatgaaacagagggggtagttattactctacaaatgttccttttttgtgtgggtgtgttcggctggtgggagtacagtcagcaatactcacatatatatgctctggccagctttgcctttaaacaaatttacatcctcagtttaattttgccatacatgcttaaataacaggaaaaatttcaattatgatggttacaccaacagaacatagaggtgattacctgtaaagtatgcaaaaggttgcaggttgcttcaggaaaatcaggacgcaaacgaagagcctgtttatagctaactatagccgtttcaacatgtccactacagaaaaggtgtcaacagtttatggttatatactatagaataccaaaaagaaatgaggaaactagaggcgtgtacagtccaaaatgttgggaaaagtctctaaagtgtgcacctgtctttataagctgaggctaagttggcatgggcttctgccatggttggcctgattgttgcagcctgaatgtagtcctgaattgcttcattgactctaccgatctccttgaatgtgttccctctattaactagtgcatcagctgcagtaggatctacccgaagtacttcagtataacatgtgatagcatcagcatagtttccctggtgcaaatacaaagtgaacatttaggatcgacttatgggtgcaaattgttgttcaagaagctactcaattagtttcttcaaaaatattagctattcaatactacatgaatttcgtccgtcattaacaagtgcaatggaggaaaggaaacaagctggaacctgttgcttgtatatcacagccaagttgttcagaggagaagataacccagatgtcacagatattgctgctttgtaaaatgaagcagccgcacttatcaggttcctgcaggatattttggtatcggtgagcttactagcaccgttttgcagttagagaaaagttatcccttaaatcttattatcggatacaaggacatgaagattctcaccactccatataaatatttcctaggttagtaagagcttgtggatggtttgcttgcagcgcaaggcatgactgcataaagaaaagtaagtcacagactgacatgaaagcgacaagtacaaccgaaggcaagaatcatactctgtagcagttaattgcttcttccactcttccagcatctttaagggcattgccctgtagagaggaaaaagcttgtcattcaactatttattatttataaacacttaataacagaatgtggtccagtggcttaccatgttattgtatgcttcaacaaactgtggatcgcagattatagcttgattgtaacaacgaattgctatatcaagctggccttgctcatagtaaatggtagcaagattacctgcatgaaaatgtcccccctacctttgtattacgaggtatactaaggctctactttgaaggtaaagaaaggaccattctcttgtaagcttgttcgtatctcacccatgatgaatatctaaataaatggactcgaaggggtaatatttaattagtacttacatgccgtttggagaacaacttaaaggtctatgattgctttaaaaagaaaacaatggcacataaaaaagatcgaagaaggctcagtaaactgctaaaatgagaattatgaatctcaccgtaagccattgcatagtcaggacgtgcctgcaccgcacgctgatatgatataatggcttcttgagacattcccatggtctggaaaaacaattatatcaaaaaaagatccacttttgctctaaatcctcccaagctcttgcaggctctctggcaagatgcttgtatcataactcatgacataactttaccttataaacattcccttggttaagatatgcatcagcaaaagatggcttaagtttaacagcttcctgaaaatcaaagataaagcatgtcatcagggaaattgaacacttatcgtttaccaccatcttggcagatggcataaaacaaagaagcatttgtaccacttcaaaaccataatagcatagcacaatatcataataaatagtcataaaaaaacataggccactcctacttttcacagtttacaatacttcatagtctctatacaagaccacagtttatattttatcagatatgagtaaacagtatggcagataatcaaacttgtgtaagtagtttatttgggacatgcataattggctcacgaatgcacaataagtagttcattaagagaccacagtatgcacatgttggccaaaccccacttggctgtcttgtcaatcctgttatcgttatccatggcaactcattagagaatcgacagccaacatagatgccagctgttctctcaaaataaaagaaaagggggttggctgagctcaaagacacaacacgagaacagtggtcatgcatgcatgatgactatagcagggcagccggcaatcaatgtggcaatcacagggccagagcaatttaggtgtttcactagatgtggccatgctaacagaagtggggtggaaaggaggcaaaattaacagaaggatctttctccttcgggtgagttagatgtgctttgactaggagattgtgttagtttggtgctcagccaatagcatgaaagaaggttattagttaagagtgaagaggggtttcctcaaaatactccactcatatgtgttcaggacttcaagactgacaaggcactacagtgtgtgccaacacagaggaatatccatgaataatggaaaaaagaacagcacaaaaacaaaacaaaagaagatctctagttccacaatctgacaaattgcaccaaaaacacatcttacataaagcaacaaaataagagattagctcaagtttgttgacgcagcaaattctaataacgtgaaaccaccagcacaaatgcacagagcgactccagttatggaacgaatggactattgcatgtcaaaaaaaaaactagctatttaaacaaaaaaacaatttaggatatattaaccatttcacaaaatggtgccatcaggcttgaatgctgcaaaaataagtgtgataattccaacgtatacagttgtggcatttaccttataatatagtaaagctttatccagatcccctgcctccatgaacaggccagcaagattcgaccatgcgatcgcaaattgtggatctatgcgtagtgcttcaatgtaacaattgtatgccttcaaatacaatgaattaaaatgtcaaatcaaagcatatgtaagcatgcatgcatcagggcaagattcttgctggagttatcaatcgtacaaattaaaagcctaagtaaaatatgaatgttcagcatggtccttatgtcagtataaaacatatgcaattggccaatcaacataaaaaggtagaagaacatacaatacttaattgataagataagcatgggaacaaaagttatgaacatatgcggtcaaaaaagcagaatggagaagagcatatcagtgcatacgatgatacaaataatgagggacagtgtaaactcacaatataaaaaaacgagtagagaaaaaataatagcagtaagtatccaggactaacgaaatctcacctcctgaataaaaccttgggccttcatcagattaccaagattgctgtgcgcatcaacctaaatcagtgacacattggcaccagtttaaagaagaaaatggtcctaccaacaaggggatagaacatagaagtcataccagcaattaaagaaatacataccaatcgagggttgattgcaagtgcttgtctacagcattgagctgcctcatttaatcttcccttccatgtatatgcactagcaagatttgaccaagcatcgcaaaagtttggtcgcagctaaaatattcaaccagaaaatatgtgcaaagttcagatacatatcaagacaagaaaagataacaagacagatcacatggaggaaataaaacattcttctcaagtacttatttcccaagaatatataagatcttccaagaaaatggcaacatttaccaaaaatacaggtatggaaacctcggattaaattttaaaatatacattatttttctttattttgcatatatatacatgcttttgaaaattttacggaaatatactttttccggagattggtgtcacggcacccgagcggtgacacggagccaacacgcgtgaccaaattgatctcgcagacgcgcggtactaacacacagaaccactgtggttcggcaccgtgggagcacgcaatcgcagcgatgcctctccacgagcatgcgagacagccccatggctgaccagggcccgacaacggacactcctgcagagctgaagcgctcacggttgcacggcaccatccggcgacgaggcagtaaagcgccagtgagccgactgacacatgagcagtggcgcgcaccatgtaacgctaggaactcaattgcctgcttggcttgtgtttactctctccgattagattaatctgtgagctggttggagctagcaatcatcttttacatttgctattatctcttccctcctttctttttgtttcttcaattcaatcatatgcatgaatgtagcactgtactattgcaagtggtacctacctacctgatgtctccaaatgatgacatttgtgttacaaaaggccattatttgacctcgtcatggttttgaatcctttgtaacagccatgtttaaagcaatcaaaccaccttattgcaagggaatgaatcaactttattgctacatttagaatgagaattgatgtattacactaatgcctagaatcctaggcttgtactctccctactatataaagggaccttgagattaatgagaaatgacagctatttcatgattcactatctacatttctaacacgtcatcagcacgtagctctaaccagctgagcaagaaaggtgaagaggaataggcaaatggcgagccatcttacccttcgagttaccggtaagttcttcacctttcttgctcagctggtaagagctacatgctgatgacgtgttagaaatgtaaatagtgaatcatgaaatagttgtcatttctcattgatctcaaggtccctttatatagtagggagagcacaaattctagtcattggtgtaatacatcaattctcattctaaatgtagcaataaagttgattcattcccttgcaataaggtggtttgattgctttaaacatggctgttacaaaggattcaaaaccatgatggctgcattgacgaggtcaaataatggtcttttgtaacaatttgcacctgctgtttacttttgctaattaacccatattggtatgactgtaggcttaagttgtcagttagatgtctcaggaccaatggtgcctggaggttacgcgccaccgctcgccttccgcgtttccactccgtgggagcgtcggctgtcgggcgccggtcaacaggggaatggtcccgcgcgcccgtggagcggcaccgttgcggtcgcgcgcttccggtttcgcgggttgctaccgtgcatccgctacccgggccgctggtccgcgagatcaactcggttgcacgtgttggcgctgcaccaccactgccgacaacatggtcccgtggcaccaacccgcgggaaacatatatttctgtaaaattttcaataacatgcatatatatgcaaacggaagaaaaataatgtatattttaaaatttaattctgaaaacctcaaccctaaaattatatgagcagaaaacaagagttggttgttgttcaaaaaaatttgataaagtttgaaataattgaagttgttgtttcaaacaaaaattggtaaagcttgatttcaaaaatgtaagttctaaacaatgcaatggacactggaatcatatcgatagaaggtgccaactcaatttttaatgtatgacattgtaagaccatgcccaagagcccaacaatttgacaaaaatgtgacaagcattgagggaaccaaaagcaatttatacaataaacttgaaccaaattcaatgaacaaaattccaaaaattaacttaggttgaaaaacgaaataagtgacaaaaacaaaacaaggaaatgtaatgcacagcagaagcaaacctgaatggcggttagatagtaacggattgcaagatcaacatcacccttctcctgaatagcaaaatatatcgcatctattttagaatgataagtattgactttcaaaacaatatactcattggcaaataagattattatttttcatgatttatatcgccaaactaccttccatgcattggccatgttaccatagcactctgcaaagtttggatcaatagcaagagcctcctcattctttgcaatacacatatcataattacgtatctgcaaaagacaaggaatcacaagcttgccagaaaatccgtgcgaaaggcaaaaacatatgcgtcagatggcatcaagtattcaggtcaatattcacctgatagtaaatagctccaagaagaagcaggttatctgtccgccgtggattcttctcataaacgatgttaccatgctctaatgcctctttatactttccagaccggtaattttgatgtgcaagtgccaaatgccgttctacatcaacagctgaaataaatcaatgaaaagcttaattagatctatcattgagcatgtgatatcaatataaataagagtatgaaattcctatagagtttttattggacaattatatttcatttgaagaaaaaaaatcatgtaatatattttctacagaaaaattttaggcttcgaataacataagattgtgaacaggtgatgatagccaatcatctagcaaaaccggtatgtgtaataagtccaaatactccctccgttctcgaataattgacattggcactattcaaatttcaactttgatcagttgtattttttgtgttaaatttatataacacttgaaaacatattatattatcgaagtgtgtagcatcataaatataaccatacatttctatttttatcataatataatcacctaaaagtaatccatggtcaaagtgagacggatgtaatcagcagtctcaattatttgaggacggaaggagaacagagggggtatttaaacagacttagcacagcagattagcaatccaaacagtactgatcagattcttgggcacttttgcttgtcttgtttaggcaaatcacccatacagatcaagagccgagacacagcaccatattagtaactcaacggctcggtgctcacccatctccagaaccagaaaagactcacaaccaatccatttcctaacaggtgtaagtctgacacagaacaccatcgagaatagcaggtttaccgagtgggtgaaacttgaaaaaggtgtaccatttctaacctagaataaaccatcagaaataagatggtcaataaaatagcctagaaccttttttgtcctcttgtttcaaggcggaaattagatagtctccaagttgcagttgttaaatctaagtaaaccaaagctacatatgcttccacaaattacgagagcacggaagtaacgaatcccccaactcctccgggatctctttttttctccccaaaaaaggagtagacccctctcccgaatctaatcaaatataggtactattcgcagtccacctccacccacaggaataaaagaaaagggaaagatcttagtagaaaacatccaagagcataacaataataagctactaataaaaggaatagtaacaaatttcaaaaacaaaaacccccttacccccgagctgcttgggcttgggctcgggctgggcctgggccctggcgtcgaccggcggcgcgggcggcagcaggaacgaggctggcgacgaggccacggactcgtcgagctcggcggcggcgcggccgaaccctagccagtccgcgcccccgagcagcgccggcgccgccgccggctgctgcggccgcgggtcgccgccgccctgctgctgcaacgagagcatctccgcgggggcgggggtgcctcctccctaaggtgaggccgccgctcggccggccagatcgcccgggcagccgcaggcagcggcagatcgggcggagggggaaagcgggagggggttgcttcgagcgccttcgagaaggtgggggaagagagaggagagagagagcagtaaatgccgccgtgttgggaatcgggaatggaaaacggaagagaagctgcagctgctggctgctgcgggacggagagggcaggtgtgcgatatatacggcatcgaggtggaggagacctgcccctgtgcagacggagtggggaaaaaaaggaatttatttttgctcttttcttttttttatctactaaaagattgtccagattcgttgtattagactatattagcttttttttatgccaacatatataaacttttttagattggtacggatattatgaaaatatgtgtgaatgttttaagaaaatgagtgattggttaaaaaaaataagtagataaaagagtatagttacgattggttgagagggtaaggtaggtggagaaataactttattttgggacaagataatatactagaaatagctatattttaaaatagaggtagtagggctacgcggcaccaggaaaatattctttttattttgtgttcttgcagctctgattatcttcttaaacctcatttacttaaatgcaatataatatatactccctatgtttcgaatgtttcgaaatgtttgacaccgttgattttttagcacatgtttgaccgttcgtcttattaaaaacgtttgtgagatatgtaaaattatatgcctacataaaaatatatttaacaatgaatcaaatgatagaaaaataattaataattacttaaattttttgaataagacgaacggtcaaacatgtgataaaaagtcaacagcgtcaaacatttcgaaacggagcgagtataaaagatccgaagcaatttacggcaaaataatttagttaccgttagacaaaaacttcgttgagttgtaaacacgactttttaggctcagtcttgtaggagtataaccgttaggtttaatttactattaaactaaggtttttcttgcggaaaatattaaactaatgtttgataatatatatctccatcctaatataagtgcatcctaatataagtgcacctagtaccaatatgatatttcatggtacaacgaacctacacctacacatacagctatccaaattcattgtactataaaatatcacatccagtttcatgtgtatttatattgggaaggaggagccccatcggttggcctaataaaccaaagcaaaagctaaaatttgatttttgaactgaattttaacaagattttaaaatattttcaatgtaattttgctacaaataaaagtgtaaaagttttacctataaattaattttattccctaataagccaaaccgatggggctagtagtatcctcgcatgattctttcagtacattccaatattacaataacatggttgtaacacatgaaaacagtctagatccaaataatgcaatactttcttctatcataaatatttgatatctttgtataaaatttagaaaaaaaaacttcactcattaattttacattatgacaagatgataaaatttattaagtttatgttgctaggatagtactccaaaacattttgtgtgtatgagaattgggaccatatattaacgatgtagtatataattataagtaactattgtataaatgaactattaaattggttatagatgatttggagctagtagttggctatctctaagcactttcaacaaaatggcattatcataatccactatccaccataataccaagcaaaacatcagcacacagaaccaatattttgtgaccaagcttaaagcataagggagagaaaagtccctcgtttttcatgcgcacgcttcctaaattgtaaaaggtatgttttttaatatatatatatatacatacatatataatgttttttaaaatcgtattaatctaccttttaagtttgaaataattaatactcaattaatcatgcgctaatcactcacttaaatttatgtatctttttaatcttcctattttccctcctctcaaacacacccttagtagttaaggcatactctgtagcaaatcatcacaagaacattgctcgacgtaggaggacaacagtaatgtgacataataatataactaaaatataatatattcatttgttgcgtagagatgttattgttattgacccatatacgtgtaacccgccctcttgccctacctgaacctgccaactactcatccacctcagtttcatactactcgcatgctagtactaaggttggtattcaaggaaaagcgtgaatagtaggtcttcaaacgtaagaatgaggtcgtattagagaatatgtaagccagaagtcattggatgatggtaacccatggtggagacgatgggaggtgagcaggggcttggcctccctcataatttgaggtttgcaatgttaatcactattgcttaagtggttttgcgtaaaattactatctctctttgtcctctttagcagaaaaatgaaaatagaatttaggattcttgttgtgtcattggagccgatgaaggacccgatgaagagaactagggatgagcatagatggtgctttcaaaatggtgctgcaataaatgttcataattgaagtcaacagttgggaaatcaagcttctccaaatttccaaatttgtagtacattttttattttgaattccatcctaaaatataagacacgatccattttttcccgtgtctcataatataaggcgtgcatgtatgcatacattaactatcaccttttaggccgcgttcgttacctcccgttcccaacttcgctccctcgtttttcgcacgcacactttttaaactgctaaacgatgcgttttttgtaaaaaaaaattctatacgaaagttgcttaaaaaatcatattaatccatttttcaaaaaattagcaaatacttaattaatcacccgctaatcattgctccgttttccgtgccagggagtgagggttcccaacccttactcccgaacgcagccttagatctataaatttggtttattttaaatcatgtaccatcaagtattccaatcatattgcttgcatatatggatgtgattcaatcgaggaggtgattaatcttttcttggtttttgtgttagaagtggttgagccttatattttgggatgaagggtgtagtacacttcatattgaaaattcataattggttattccatgttccaccaaaactcagctaaccgctggttgaaaatactactccatccattccattttgatcaccttaaaatttttgaggtcttccgaaaacagtcattatctaacaagggtctctttatttatttgtgcagagagtacatgtgcataattgaatgtattgcatgcatccaaccaaaattaatttctattgatgcaatggcatacagtatttaaaacatgagaaatccgcaggacacaaagcgatgaagcaccttaaccgaggaggattaatttaagaatgataaatatttttgggatccatagtcttggtgtcatttgcttatgggatgatcaaactggtatggagggagtattactaaacactagacacttagggtccgtttgatgcataggagttatcaaaaacatattcacatgaacttcgtaggagtcaattcatattatctagatttcaagtgcctgaaatttcccaaaaaaaaatcatatgccttttctaatccatacttatcaactatcactccccagtagtttgaaatctaacatagaaaatgtcgacgtttgatgtcgtgattccggtatttgcataatatggggatcgttggtactaggatatatgcgagactgaggtaaaagagatggggacgaggatttttatataggttcgggcccctgaattgtcaggtaataaccctactcctgttggccgaaaccagtcgttgctcttattcatcataatcacaccagtacaatatttggggtagcctatctatctgttgtcgacttggcggccataaaaccatcccgtagccgacaacagagtagtcttcctcctcgaatctgtatccggcgagatcaaagacagcgctatgtctctcctgatagtatccgtagacaccgtaggggactagccatgcttatctctgaagtcgatatccggcgtcttgtcttggtgtatgttgacttgtatgttgatcttgtgtattgatctattgttccgtctcccctctcctcctagggggccttgtatttatacccataggtgtccccttgtccaagtagaactaaggaaactaatatggatacaatccgagtagttcttgttgtttccatgtagaactctagtcatcctcccttatgcggaactcctcctatatccgaaggttgtttccatataagacaaggtatgtggtgggtcctgccgagatttagtcaactactattaggtatgtgctatccataaccctgacagaaaaaaattacaaaattagatgaaaacaaacttaattataactcacaaacaatacaaagtcacataaaaatcaaacttagacaaaaaaaagaagtaaaactatctataacaacatatttgcttttgaaatgaataaaagttgcacattgcaacttagggttagtagtgtacaattttaggtgactagaaatttataaaatttcaggcacctaaatctgttatggttatggataccatatacctaatagtagttgactaaatctcggcaggatccaccacataccatgtcttatacggaaactgacctcgagggagttccggataaggaaagacaaccagagttctacatgaaaacgacaaggactactcggattgtatccatattagtttccctagttctacttagacaaggcgacacctataggtataaatacaagccccctaggaggacagcgggacacccaccatggggtgatcaacacagacaatcaacgacctcaatcaacacccaacacgttacacgggacaacatacaagcctacatacgccaagacaagacgccggatattgacttcagggataagcacggctattctcttacggtgtctcaggatactgtcaggagagacgaaggcgctatctctgatcttgccgggcacggattcgaggaggaagattaccctgttgtcgactacgagtcagaccttcagaccgccatgtcgacaacagttagataggctaccccacatattgtactggtattattatggtgaataaagagcaacaccggctccggccaacaggatgtagggctattacctgaccgctcagggacccgaacctgtataaaaatcctcgtctccatctcttttaccttagtctggcgtatatcttagcaccaacgatccccatattgtccaaataccgtagtcgagacatcaaacgtcgacaaaatctagcaattttcattcttgaaacaattgtttagttttatgaaatcatactgttatattcctaggacacgcgaaagttagggtttgattgactcattaccgagggcatgttggaaagagttgtgtggctgttgtgcttattcttgcacatgaaactgaacggatcatcactagcacatgattagttaaatatcagctattataaatttttaaaaatgtatttatttgatctttttttaaaaaaacttctatatagaaaatttttatacaaaacatcacaagtagcagttcggaaaatgtgtaaatgaaaatcgagtaagttgtcgtttggagttgttggaaataacagcctaagagtgtgcgaaggcacaagcctctggaatacatatctaaagttggtcataataattctttgtatataagcaattcttctttatcactgggtataaatcaaccgcggctctgataaacaaacgttttgaataatgtctaaatacaaagatgatatgcatatcttggtgagcaccaaacaatgctcgacatcatgagaaccttatcccttggaaaaaagggtgctgtgctatctttttcttattaagtatgggcgtgaagcatcagaaggggtttcattggttaggcggttgagcaccgcaaccttcttggctcttttccacggagagtgagacacatgcaaatggagaaagcgactgagagtcgatcgatccgttaatatgaacactgctctggctctcgatggagtctcctcgatctcctggagccgacaattcaagagccagcccaactgtgatggaggagggaagaatcatctccgccaggtctagccaaacacaccaattaagtgattaacctgacagattagcttgatcggatccagtgtgcagacgcgtgctgcgcctcctcttgcctaggtctagttcttttctttttaacttcaaacttcacatttctcgtattttattaacacgattttcaaactattaaatagtatattttttaaaaaaaatattagattgtttgaaaaaaattaaataaatcattaattgctacttaattaattatatgctaatgagttttatcttttgcgtgtgctgaaaatctttctctaacttgagagactcagcttagaataattagatatcactgctcgatcaatggtttgggttagcagtaaaattatcatggcaaaatccatactgtaggtgagagtgtgagaccatgcatgaaacctccttgcaaatggaaaagaatatagaaaagaaagtagatattcgatgttcatgtacacatagaccagtggttagtaaaacactgccacataggtgtttaacggttcataggaataacacaatgattttcggtatcgatgtaaatcggaagccttgaaatagcttttatacgaggatctcaattaattagaaatgctcaaatacatgcatatttgttagatcctgcgaaatttatctgaagttatcactcgttctaattaattaaggcctccttgaaacctataaatattccatatatgattcatgtgcaaaacaaagttgcattcttacaaaaccttacaaaattaagccctttgattcaaaggaaaatcatagaaattttagagaattttatttttataggattttctatataaaattatttgaatcaaaggaataaaccctatgaatcctaccaaattcatatggaatgtctcattccaatgtaagttttgaaggaaatttaacaagaggtagaacctcatgaaaagttttatttgagtctttatctctcctcaaatttctatgcttttgtgtgtgtctattgttagaaatttggtcataattcggcatattttaatccaaaatattaagataatacatatgacatttgtaatttgagtagatctagtgaaattgctagatgtgtacaacatgagcatgcttaatatagaataagtatcaacatagacaagagaacgcaataatattgcgacctacagttataggaaacgaagaacgaacggtaatagtgaaacgttatacaccgagaatggccatccgctggagtttgagacagtattgcctccgttggtgttgacgggaggctcctcctccttgtcaccagtgttgttgttgtcgccggttgtcgacatgttggtgaagatgatgcagagcagtcgcgcttgaagcgctacccaaaaacatgatcgcccgcctacccgtgcaggttctcaagcggacggagtttcggaggcacctgctcgttccgatcacctgtgtgcacgggatgaacagaaccggggaaacagagagacatcacaggaacataaggagagtatcaccaagaaacaatagcagaaggaagacacaatctttgagagcctctgttttgctttatatatagagagagatctccattaccatacaaataaatctcatttattgtgaaggttaccacaaaataaatctcatttgttgtgaaggttaccacacaatgaatctttcatttgttgtgaaggttacaacaaataaatctctcatttgttctggatgttacaacacaatgaatctcttatttattgtggaggttacaacacaaataatttcatttgttaatggtgactttattctcgtctgttacaaaacggaagagcagcaggcaggctcggctcggtcggccgcctcgtctcgctacgcccacggccgaggccgactcggcacgcgcgcatgcgtgtggcagtccaaccatcacctcaaccggtcaacaagaaatccccaatatcactctatttaagttgaggttcttccacctaaattttcaatgcagtattattgtctctaacattacttgtgggctattaagattttaatttaattaaattgggcctagcccatttattccaacatccattgctcctaatcaaaaggtcattccggtgttttattatgttttacaatcctatattttatacttatattttgtcaaaattctatatttttgttccttcttttttattcctacaattgaaaggggcatagtgtattctaaattcctctggaaaatactcaggacacttggcaagccaatcgagtcacggttgtccaagttaaaaaaaaaaaaagagccatggttggaagctgccgtagaagatcatttggtggcaaggaaagacaactgccgcgaagactacagacaagcctcgccgtgtcagtcaactccaccacactcatgtctccacgtttattattctgcaaacgattttccctccccaatttatattattccactcaaagagtacattagtaatttcgaacgaattggtctggtctagtttgaagactatatagtgtgaaaaatgtgttaccttaagaaaaaagaacttcactctagctaatcgataatacgatttatgtgtcgcgctcaaaaaaaaaaaaaagcccatcaatgccctcatgtacgcattgcatgcatatgctgttggaaatatggttatatatcggtatattttaatccaaaatattaagacaataattatggcatgaacaatgtggggtgatctagtgataaaatcaaacataaacaggagcacgcttaagatagaataagcatcatcatcatacatagaacgcaattgcattgcgactaacagagatatcaaaaaccgaaataacagtagagagttataccctgtgaatgtccctccgctggattgtgaagcagagctgcctccattggtattgtcgatcggtgcacctggtgcggcagctcttgctctggctcccggcgcgccatctccaggtgcagatgcggcagacatggttgatgcagacgtacggtcgacgacgaacagaggacgaggagcagtcatgcggaagcactccccaaaaacctgatcacccgcctacccggtgcagatctcaggcgaaggcgtggttccggaggccctgctcgttccgatctctcgtgcgcgcaagcgatcagaaccggggatgtagacagaagcagcacaggcagcggcggcggcacgcggaggaggaagaaccagcgtttggaaaataaccgagaggatctgatcgggttcccactttccttatgggcgcaggagagagatccgcccgtggaggaagaaccagcgtttggaaaataaccgagaggatatgattaggttccctctttccttatgggcgcaggagagagatccgcccgttaccgcagtaacgacgcgatcaatgggtattgaatcgggttccctctttccttatgggcgtaggagagagatccgcctgttgccgcagtaacgacgcgatcaatgggtattgaatcgccctctttccttatgggcgcaggagagagatccgtccgttgccgcagtaacgacgcgatcaatgggtattgaatcgcctacccgttgtcgcaacgccacgtctcgccctggccggctcggctcagcgtgcgcgcacgcgtgtggctttccgatccccacctcaaccggtcaacagggagcctccaataactccctatttaagttgagatactcctcgtttaattcccaaggtggtaatattattcttaacatttattatgggccttttgagatttaatagaaaaatcaggcctagcccatttattctaacatatgcctccatccacctgttacacaatgcacacttgaaaatattttttttcctacttatatagtttagccgaaaaacatagctatacataaatacaagagaattttctatttggcctccaaagttgatcgattttctcattttccccacgaaattgattgtccctctaatgccttgcattcgtaacttttgtcctccatggctccatcttttattttgtttgttttccatcaagtaggtgggtaaaaatgacagctttgcctcagcttgttttatgcatgtcagtagtttttatttttcttttgggtgggattatactttgttattatggaccaacggttattgaatatttctcacgaacctaaatgttattttgagtaatgaagcgttatgaaaaaccctttgaatttgataaataacttttgagaacgaagggggagccaatttcgtaaggacaataggggaaccgatcaactttggagcacagataaagaattttctcttcgtactacttgagtgaattgcagtttagaccacccttttatcgttgaagtttcactttagattatcccatatattaatcaatatttcttcactttgagctaggtaattttatttttattgcatatcaataatcttgagtacacctgtccctgtaggttgatgaactctatcacctatgcatgtacctttactaaaggagaggctagacatgattagagaagtgagttggagtggtccataatgcaaaagtataaagttacctaccccaaagtactccctctatccgtgaatataagggatttttttttacaagaatcaaggaagtagtaaaataacatgtgatgagacaaaaggtgatggataaaagaataaagtagtataaagttagtaggtgggagaataaattagtataaaagtaaatgatggagaaataaactagtatataagttggtacatagaaaatatagtactgtcttgggtcttaaaaccccttatgttgtaggacaaacttgatggagaaaattccttatattatagggtgaatagccgaagtggtccttcaagtttcatctgaggctcagtttaatccttgatgtttcaatctttccatattagtcctttaagtttttattttagtttaaacttatccttgaaccaacaactctcttgataaataacacttatacccccatcattcacatatataagagaaaaattgtatgcttgatttttttatagataatgtatagtaaattatgtaaaacgaaaataaattatgtactagcaagtgtatacgatagcaattgcttaagtttcatgtgcacatgtagaaataatgggaagtatatctacaatgttatttattcatcttggttttatcctttttatatatagttgtatataaattaagggcaaaagggacattttctaatagaaatattgactaaaaatagccatatggcatgttaagtgggcccaaggatgatgtcaagccaaaacaaatatttagaggagctatgtggacaaaataaaaagtgaaggaccaaattgagccttcgataaaacttggaggactaaattagctattcaccctatattataggatggatggagtagaaagattagtgtacaatatacaagctgaaaatttgataataaaagttgagtcaaaatggaattcactctagatactttgacgaagagtatctcattactgttgtttcaatgtgccaaattggaatgtgatgcatactccctccgtccaaaaaaagacaaaccctggtttccgtgcccaacgtttgatcgtccgtcttatttgaaaaaattatgaaaaaaattaaaaagacaagtcacgcataaaatattaatcatgttttatcatctaacaataataaaaatacgaattataaaaaaaattatataagacagacagttaaagttggacacggaaactcaggatttgctttttgttaagacggagggagtacatgcgtggccaagagttgttaaacccgctgaccacaattccagaagcatatgaaagctgaaattgtccatgcatgccagccgagctaaccatgcatgggttgacagctatcgcgttttatgtacggaaaggtcgtctcaatttaattggcatacggatcatccaacaaacgggagtcgaaatgaaggccccatacaaatattttataccctctcgtatcgaatgtttaaacacatatataaagtattaaatataggttaaaaaaataaccaattgcacatattacaactaattttgcgagacgaattttttgagcctaattgctccatgatttgataatgtggtgctacagtaaacatttactaatgatggattaattaggcttaacaaattcgtctcacttgtttaataacggattctgtaagtagttttttattagtacccgaaaaccctatgcgatatcctactacctctgtcccaaaataagtgcagccatgagtttccatgtccgactttgatcgtccgtcttatttgaaaatttttttattaatattttattgttattaaattataaaacatgaatagtactttatgtgtgacttatttttttagtttttcaaaaaaaaaaagacgaacgattaaagttggacacagaaacttatgactgcacttattgtggaacggagaaagtactactcaatgtgatatacacccccgaaatttaaagggtaaattggaaacatgccattgtaattttacaaagtttgagatatgccatcggtatctcaatgatatataggacccacatgagtcaatgacatgtgggtcaggatagtatatcttaaattttgtaaaatttataatggcatggttccaattttcccaaatttaatttaaaagctaaggtaaggagtaggcatcgtgagagatatggtacgtaggcccatctggcctttctaccaaatcgccaaccacgcaccttgattccgtatcacgcgacctccagcggttgacacctgtgccgcttctctgtcgcaggatcactggtcagatcggattcgacgacggggaaggagacactcgtcgcgggcagcagcacccgacagaagcacgcggggacgtctccccgtcggcgccagctgccttgcaaagccaaaactaaatgggggcatttgcaaatttgccaccgattttttcaatattgcaaggatgccactcgaatgatagttttaatggtatttttgtaattttctagtgacagttttataataacgattcaagatagtgataaatttacaattgccccaaactaaattaccccaccaacccgtaaaacggagcaatcactagtatatgattaactaaatattaattttttaaaaaaagtaaattaatatgattttttaaaaaactttctataatattttaaaaatacaccccgttcagccgtttgaaaaatgtgtgtgaaaaatgaataagatgagttgagaagtaagagtggtaagttgggaaaggagaaagatcggtgaataactccactattccatcttttcaaaaaatacattagattgaaaacccaatgtacatagccatagtgctcgactattccacgcagttagacgtaaaatgtgtcaatttcctgttcttgttcatattaaatgcctttaaacttagcatttctttcttaagaaaaaaaacttggcatttctttcatgttagaaactagcagcatttactaaggggtaaactcgtctaaaatgtccagcactatatggaacgatatacattttcgtccattctgtaaaacgctacaacaataggaaatatgattaatgaaatattcctggaaaaatcctttgtcttgacgaaataaagtgtgcattatatttttgttcatagattcatgtcaccgcttgtgtcgggaatactatgtgtatcactcaagtaaaacaaatgttttgtaggaaacatgaatcaaccgcatgtgttgggaatacatattttttcaaagaagatgaatggtcaatcatatcccgttatatattaaaaagttggagggagcaactattataaagttaaaaatatattttttttgatttttttaaacttgaatataacctttttcatatatcgtttagtagttaaaatatgctcacaataaatgaggaagtagcccaatgcaacagctcttcaagctctgttcgatgcggcgattggatttagttagttattagaacatgattaattaagtgtaaacaattatattttaaaacataaatatatttatgtttttctttagaaaatttatatagaaagtttttacgtgaaatacgcactgttagctgtgagcttacggtaaacaagagatgaatcgaacctaatctcagtttataacacgatcttaagtatcctaaggaagatatatggcctgtttatattagtgttaaaatcaacctttccaaaatggtcgtcaatgtttggtaggatatgctaaatgtattgccgccaagattctctagggattaccaatctcaatcttcacatctatatctttatcaattatactaaaaattttatatgattcaaaattacaccaatctgaacaggctcatacatactttggtatgtcagggcttgtttggttcaataccctatcaaaatattggtagtgccaaaacctaggcaagttttggtactaccaatttttttggtagggtagagttatatttggtttgagaccaatttagaaccaagcattgagtagaatatagaaaatatcaaattgggcattggcaatgccaatgatttggcttcaaaccaaaatcaccagatacactgttcaaactaccaaagtattggtagggcacgtttttggcactaatccaaaacagccctcattctccccgtgttggaaactaactttatggagaaacgcaatgtttctaaaagcacgatcaacagagggagcaaacaacaccatcaaattccagcacgaccgagcaagtgttgattccaaatatatttttggaattgtttggcacaaatccatttaaactgagagtaaagttgagtggagctcagccaaacagtttcagctccacataaactaggagcggagctgggtgaagcgttatcacaaaatgaactagagatatggagctgggttttggctgctccacaacttcactccagacccaactcctagagccaaattttggagttggagttctaccaaacatgacttttttttaaaaaaaaccctcaaatataaaaatactcgagtctactctacctccatccagtttttaatttaaaccagcgctactactgctccagccacttcattcaaccccgtcttgtcttcttctccctttgtgctgaggtggacgcgaagccgccgcacccacactcaccccccacaacggcacgctcccgagaagaattcaaattcccccctcacctctcctcccctcctcctcatcctcctccattctcgaagccaaacccatacagcgatgaggtccctcttctcgtccaagctctcccgcgcgccggcctccccgccgccgccgccgccgcacgccgccgcgggcggcggcggagacgcccacacgccctcgtcgcacggccaccgccaccgccgcttccccaaggagaacgtcgacccgtccccctccccgggcccgtacgaccaccactccgcctaccgctccccgtcgggcaagcagcagcagcagcagcccctcgccgccaagaaccgcagcctcccgccgcggcccccgctcaagcgcaagctcctcgacgtctccgccgcctcccccgcgcccgagggcgcgcccagcggcggcggcggcggcgattctggcgtccaggtaggctagggtttcggattgggtggagccgagagggaccttggctggatctggttttgatggttgtggttttgccgtggcaggttgtggtgagggtgcgtccgccgagccgcgcggaggaggaggatgagggggccgggaaggaggtgtgcgtacggaagaccggccctggctccgtcgagatacatgggcaggggttcaccttcgattcggtcgctgatgaggcctccacgcaggtaggaggagggtatacgattttagttccaattttagtgtgttcagatttacacgtttgcagttgtgtgcttccagcatttgtgctaatttgattgcttatgaggagtactgggttatgtttactgtatgtatgtggtggatagttcgatttcattgtattttgtataagggatagtattagtggatgcaggcattctatatgattttttttactcccatcttgtccttttactcgtatttctgcataaagtcttgtaaggcgcggtacatgtggcacatttacctggatttcactgttaccagtaattgtagtagaatttgcatgtggcatatctacctgggtttgatcgtgggttgcatgtgtaggaggatatcttccagcttgtaggtcgaccactagtggaaaattgtttggatggcttcaacagttcaattttcgcttatggacaggtaaatgtggcttcagccacctttcatttttctgctctactgtggtttctgtaaagcaaattgactaatacaatcaaatttctactttgtaagactggtagtgggaagacttacacgatgtgggggccactgtctgccttgtccgacgatacggtcagcaaagagagggggctgactcctcgtgtttttgaactactgttttcacgcatcaaagaggtacgtcatgatttgctatatagctcccttttttcctgattgcaaattaaaggtccatatgtactgttaatttgcaggagcaagctaaacactccaataaacaactagtataccattgctgctgctctttccttgaggcaagtgctatttaagcctctaaaatcacaataattatgattctctcttgtgatagaaattcagaattactttttaagatatgcagatctacaatgaacaaattactgatttgttggaccccgtgcaaagaaaccttcaggtgaaatggagtttcagaatttaattaaaatacttcctaggctgcttctgttctgatacgtctcgtacattttcagattagagaagatgttggtacttcttctgtttatgtaggctgcttctgttctgatacgtctcgtacattttcagattagagaagatgttggtacttcttctgtttatgttgagtcattgacaaaggaatccgtgttcacgataaatgatgttacacagttgctagaaaaggtaaaactgtttgtcttatcatctaaaaccttatcaccagtgcttgttttgctcttccatgtagttgtaatgataaatgcttactccaatttttaacaaaagttgtatttactgctcagaagtgctttattgatgtagatgttctaaccatataataataatatgctacttcatagcttatgtcgttttaagattatttgttccactagtagctaagaaaaattgatcctaagataattttagataagaaaaaagataagaaatgatgcatattttctgtttttgcatgttttgataattttccatgcaagtgtctttaataatggttctgccctatggcctggcaatgtgcatctctttcatggataatttcattttatttattaatgatggtgcagggtttggcaaaccgaagaactgaggctactactgcaaatgcagaaagctcacgatcacactgtgtttttacttgtttcattaagtcagaatccaaggtattaccttattcatactcgagtgaaactctaaattttatccctcatccctgcccttcaaccaaccttttgagcacatgattgcatctttttattacattagaaagcaaagtgtattttataggagcattgttggtttttaacaataggttgctttctttttctgaactgacattttctctttggagtagctcttattacccttgcctcaatcttttccttttccctacagaacgcaaactttaactgaattgtaggatagctacttgtagttgtaattttttggacgcattaccattagggtatttccttgatgcctgatagtgcaaagttgcattgatggctctttgaggacatccttagagagtcttaagtaatctgttacatcttcatgtgttttgctggcatgctgagcatatattcacacttagctttctcgcatatggtgggcattccctgggaaaaaatggtggcattaccttttgattcatcttttgctcatgtatttgcatgttatgctgtctctgtaaattcaacgagctattccctccatcccaaattataggtcaccccctttttaaggaaaatcatacttggtaacttttgactaataatcatactaaccatatctatgctaaatattatgcatgttatatcactagattcatattttaaagtactttcatgtgatgctaatttcatattcactagaaacataacatgtaatgaattaatgatcaaagtatgtcattgcagaccgtgtaaaaaaaaatatagggctcataatttgggatggagggattatcatgtatatatgaagtacctgtaaattactctgatgctaatttcaattcatatgcttccaataacttattgttcagcatgatcttatagttcttcaactttgttactattgacagaatatggaggacggatcaaactttacaagaacaagtaggatcaacttggttgatcttgctggatcagaacggcagaaattaacaaacgcagctggtgatcgcttaaaagaagcagggaacataaaccgttcactttcacaattggggtatgatttgttcaatgaatgaagaatgtgttgaaagcctaattactattgccctttctgttgcatctgaaggatttatggttggtttgtacaagtattccctgttgccatcataaatttagcatagcttctttacgttgcaccattagtttcagtgtacctaataaagtatcagtcatcatagaattggccagatgtgagtctctaaatgtatatgaagcattgttgtgccctttatatttgaaattcatatttgaacagtatttcataaaacaaatggagagtattacatgaatttgaaactactgtcattttcattttttaatatgattttgagaatgttttcatacatcctggtatacaatgcatttggaaacaaatatgtattgaagacaggaaaaattactaaacttgagacaaatacccagggatttctttatggccttttcatactgatttgacatggactagatgtgggctccttaactgatcctttatgtcttgcattatactgctatatgattgcaaaatttcctagatacagttacattatgttccttccccccccccccccccacacaaaaaaaaagttctttagaactaacaaaccatagacattcagtcatttgcattttaaaattaattacgctggtcagaattcagaaatatttgaagcttaggataggatttcattaaacttttgaaaatttgaccattcgttttatattatataactttataaattctaataagttcataatattatgatagtatttttcaaggcaaatctgcatacaccaatttttattataaaataagcagttgaaaagtcattgatgatcaaatttcaaaaggttgaccaaatcttgtcctaatcataaaaaaaatatggtcggagggaagtaaagattcactaattatttttctacttattgttgctgcagaaacctgattaatatactggcggaggtatcccagtctggaaaacaaaggcatcatattccttatcgagattcgaaattaacctttcttttgcaagaatcacttggtggtaatgctaagctcgcaatgatttgtgcggtttcaccatcacagaagtactgtttgagactgacatgctattttcttttgccattcttgcttcttcatgtgcttataatttgttttttcttctgcagctgtaagagtgaaacactaagcactctaagatttgctcaccgtgcaaaagatataaaaaacaatgctgttgtcaatgaacaaagagaggatgatgtcaatgttctccgtgagcaaatcaggcagctgaaggtattattttaatttctttttggtaatcatgattttcaattaattggctctatcgttattgcaggaggagcttcaacacgtgagatcaaatgggagcttgccaggaagcaatggcagcccttccactgggtggaattctcaaaatagctttcttttgaaaatgagcttgagtcgtccaactgcattccccaccatcaaagatgatagtgatgaggagatggagattgatgacaatgatgttgaaaagccttgtaatttagaaaacaagtcttcatttcctcacggggatgttgaaacaagtagatgcaagtcaaacttggcagcaagcattcagaagggccttcaagtcattgaaagccatcggaatagtgttacttggaggagatcatcattaggtcttaacactagacttatggacgctcatctttcagttccagtttgcaaagttgatgtggctattcaaaccgaccccgaagaatctgaaccaagacaaaacactatggctctaattcctagcaatcagcctgaagcaactacagatggaaacagagaaatctctgattgcataaatctacagttagtaacagttgatggatcaataccctctaatgatctaaagcaacaggaacaagtctttaaagtaggttactaacttactatgcagatgtgtgcaccatttatctgcaatatcagcatgacaacttatgcaagggtttgttttattcctataggctgtggagaaggtccttgctggagccatcagacgagagatgttacgtgatgaacagtgtgcaaagcaagctgctgaaattcaacagctaaaacgtttggttggtgccttgcccatgctatcagattttaggatcttttattcgtcgatctgaagtgttttccttttgcaggtgcaacaatataagcatgaacgtgaatgcaatgctgcaattgcacaaatacgagaagaaaaaattgcaaggcttgaaacacttgtggatgggattttaccaactgaagaacttatgcatgcagagaatctctctctccaagacgaaaacaaggtcttctgcttttccatttattttctatgttgccaaatatctacttggttcttttgaactgagcaaagctatattcttaaacatgtctctgtatcaacaaaaacagattctccatcagaagtatgagaaccatcctgaagttttgagtgctaaaatcgagcttgaaagaatccaagaagaattggagaggtacagaaacttcaaggatgagaaggaagttttactggaggaaatccaacacctgaaaaatcagttgcattacatgctgtcatcatcaatggcattgtgtaggcctccagttgaacttgtccaggcaattagtactgtctcagatcgtccaaccatttcggctttggaagaagctggtgatgacggccacagcattgtcgatgctgctgagagtagatggattactcttacagaagagcttagagttgagcttgagaagagtaaatctctatctgaacgtttgcagcttgaagtggaatcagaaaagcaatgctcagaggaattaaagggggcattggaaatggcaatgcaggggcatgctagaattttagaacagtattgtgaattacaggaaaaacatgcatccttgctctcaatgtgtcgcaccatcaatgatgggattgaagatgtgaaaaaggaagctgcaaaagctggtgtgcgaggggctgaatctaagttcattaatgctcttgctaggcaagtatcaattttaagagctgagcgagagaaggagcgtcggttttggatggatgaaaataaaggccttcagcaacagctaagtgatactgctgaagctgtgcaagctgctggtgagcttcttgtacggttaaatgatgctgaggaagctgcatcacttgcgcaggtaacattttctgctttgcatacatagatatgcttggaaccttggtacgtagttatcgcatactccctctgtattcgtaaaggaagtcgttttggacagcgacacggtctccaaaacacaactttaacttcttgtttctataaaaatatttattgaaaagtgatatatgtatacttttatgaaaatatttttcaagacaaatctattcatataatttttaaattttcaaactcaacaacttgagagttatttatgatttatattcccaagatttgacttaaacattgtcgtaaacgacttcctttacgagtacggagggagtactgtacattaagtttgattctataatttataaagctatttatcacatgctaaattcctcgagtaagtgatcctgagtgtaagcatcttttttatatgctctgctttagactccagtacaaagccaatctgatgatgtttgcatcgatactcccagttaaaaccgaacacctaattcttcccttgttctgtttttttatggttccatgccttcacttctgcgtccaaatgaaattctgttcaaatcaactcttgtgagccaattgcacccttgtctcaggctaatatccattgatgcatcttaatttcccattcggaaataatgtactaccaattattttgcctttcatgatttgcattgtttttttatctggttctcgttacttatcttaaacctgtgcagtatcaactaaaatttaagtaacctgaaaaattagaacaatgataattgagttgatgtcactatttcatcaaaactaagaacaatattttcctttgctgcagaagcgggctgagttagcagagcaggagatgaacaaggcctttgcagaaatcgacaacttgaaaagggatcatgaccaagaagttcttgtgctaaaccagcggctcgctgaatccaaactgcccagcaatgttgtacagtcacctgagcctagtgagaccggccccgctagatacgacacaggtgggagcttcggcgatgagcaatggcgagaggagttcaagcccttccagtcggtcgaggtctccaaaagcagtgatcccagctcatggttttatgggtacgacaaatgcaacatttgatgaggcattctggagccatttatattgatttatttttggattctttcacctagaaaggtataatatgttgtacaccttgccattgaggaaaagaattttcccaacgttggctttgccatggcccatataccaaaccgcagcatccctcgctgcctagtgcctgcctgcccctatcagcaggactttcacaggttgtatgttgtgtcgcaaactgaaaactgtaaggtgtatgtttagatggattgatgatgcatgtaaaaatggcggacttattttttgggcagttggagagttgatgagtcgaaacttacagttaaaatttatcagaattatcttttttttcttacagttaaaatataatgaatttgaagataaaatttacatacaagtgtaattagaaatttatgtataatttttttttctaaaattttcggttatatttgctaattgatatgcaaaacatatattaaaagcttatgtgaataggatatgtttatgttattacaagtttgtttagtatcatctaagtcggctctatctccatgcatcgatactgttttgccgttgtcgcctctgttgtgcactcaaaacttttttctcgtttgccagcttggcaagtttttgttgcagtaatgtaagagcgagtacaatagcgaattaataatctaatctaattattatatagtaggattttagcatattagcagagaaatactccctccgttccaaaaaagccaacctaggaagggatgcgaatataaacaaagggatgtccagattcattatactaggtaggttgactttttttttgacggagggagtaaactgtatagagaaaagcccgtgactaattagacgcgcttatgcaaatctgcacatacgtgggctctctacatgtcacggcgcacaatagaaaaatagaacatgcagcaatgcccaactccttggaacaagggactgttacgattaaaagtttaaaacattgaaaccttgaattggtgaaagcaagttaatagtctgttgttgtatgtatggtagtttagctatctcttagatgtcgttggttgcacgtttattgaaggaataagttcacctgtcattcctcaactttacaccgagtttgtttgacatcccttatccataatatcataaatcttcaccccataaattatacaaaactgtgcaatttaggtcccatagcagcatagatgcctggttttgccgacgtggcatcatagagaaaacaaaaggtatgtggggcccatgtgtaagtgagacaaaataatgtgggccccacatctcttctttcttttctttattctcttctctccttctcttcttgggggctcgacctctcatcctccttgccggcggcagatggggaagaggtgaccggcaagcctgggcgagctccgccatctcaagaggctttgtcgtcaccactgccgctaccgcacctaacgatgacgatgacgacgcacacgcgccagggcggcgcccatgttcgccgccgctgcacccgacgacgacgacatgtgcgtgtgctccaccgcctgaccaagcaccccgcctttctcaccgccagcgactggtatcatctcgccaccaacgatgttttgttgttgaccatcatccatgcgccactgttggagccagccccattgacgccgccggacgccatgcctcttcccgaagactgcactgccaaagttgccgccgattgccacagctggctttgcggcaacaacaacttcatcatcgctgccgcccgccagatctactctcctcctcttcctccacctcctcctccgccgccgttgactctcaccgaattgattagtcgctcgcgtgaatgggtggatatggatattgttagtgtttgatggggaggtgggggtggtaggtgggtgaggtgtggcaagatcactggcatgatgcctccctaggtgagcggtgggatccatacggcggcggcgaggacgaggagaggccgagaggggatccatctgcactggcacgacgccttcctaggccagtgacgggatccatgcggcggcggctgaggagtaggagcggccgataggggacccgcccgcgctggcacgacgccttccctaggccgcggcgggatccatgcggcggtgaggaggaggagaggtcgtcgtcgttgggggtggcggcggcggagcctctcgaggtggcggagctcgggcgggcttggcggccacctcccccccatctactgctagcgaggaggacgagaggccgagcgcccgagaagagaagtaaggagagaggagaataaagaaaagaaaaaagagatgtggggcccacattattctctcacttacacatgggccctacatactttttgtttcgctctatgctgccacgtttatgggactaaactgcacagttttatatagtttatgggtgaagatttttggtacagaggataagggatgtcaaagagggatggcaggtgaacttattcctttatttaacattctctaagtgcagttagcgggaaattccggccagatttattgggcttatatggcctagagggctagatgtctctagaatctagatcggcggccgggctcccaccactccacactccacaggaatgctaccaccactcgtgtctgcgctttcgccacggtctccgtcgcgtgggcgcgaggaggatgcaaacggaggaggcagccggcgaggtggtgggaggcgttgtctccggcggtggcgcttggcgagtgaggctggtgcgggcgctcggtgcctcggtgctgaccgcgaagagagggggcttgcgggcaaggcatgcagctcaggtgctcgacgaaatgccgcacgaggggaaggcgctgttccagctgcggccttcggggatgagcgcgcggcagggtcaaccgccgtgaacgtacagtgggatctgggccaggatgctcggtttgaccgggttgccgcgatggcgtggcggaggcagagcactgttgccatggacatgatggctcccaattgggcaccttctgctttcatgtgtcactggggcagatgtcttgacacgatgacaaccgggcagtggagattgaagagatctagatgtgtgatcgatgtcgcctatgcggggttgcgctcaggctcagctacacggctcatacttgctgacatacgaattgatcttgatcagagtggttgttctagtagcaatatctgatggcagcaagatcaatttcccagatagcaagaaccatcgatccattctatgcgtcttcctgtcaagacctcagatcagtgttcatcagttgatgatcaagtgacaccatgatgcagagttacatgtttcactcaaggcaaaccagaaatctcgtcagaagcttcacgtcctacatctgcacaggggcagcaaaaccagaaatctcctggtcatcaagtcctcaactcaaggcttataaatagaaaggccccaggcttctttgtatccaaacacctcttcacatttttccctccaagaaaccgacccgctccactccaccccgcaacgcaagaaaccaagaactcctcgaccgccggctcgaggccacggccacccacccaccgccgccgggaagcagcgattcttcctcgggaaggaggacaccgccggccatggatccggaggcggaggaagcgcagcttcgcctcgagatggagttggcaaagaaggccaaggcggacatgtctgggttgcaacgctccagcagcctcggcttggaccacgccggcttgtatccgctgccattgccgccagggtggcggtccgccccaacctcgcccctgaggacaccatcgagcccgcccccgctccagttcccgccggcgtgggcggctgatgttgccggcacgtcgggctcggcggcgcccgaggacgatggcccagcaagaaatgccggcgctgatgaagccacggctgggtctgcgcccaagaacgaggacccagcaagagctgcgggcgccgatgatggccccacgaggtctgactacgccgcgatgatgcggatggcattggccaagttccaagacgacgatgctgctgccgacgacgaggaggcggcgtccgcggtgatggagcaggcgatgaccggcctcatggacctcacctaccgcaaagcgaagcctccagagctgccttacgagttcgccacaagatggcctattcctattgctcatgtaagtgcctgctccttggtctcttgactctgaattcttggcatttcttgtcgaggcttccagctctgttcatgttcttgtcatctttgcctctttgcaaacccgcctccttgttctgtttcttgtttgtttttgctgctggtgggtagtaggaatttctttgttcctgtttgttttaggacgaggaatttcctaaggagatcaattgcatttctttctgcatctattttgtttgttgttgtgcaagaactgcctgctgtttgattctttccctgcatcgtgatcagtgatcaccaatgggaaacatcttgtgctatttatgatcaatgaagaattccctttcctttagttgggcattattaattagcatctggttgaatttccttacacgcgctcgaattcgatcatttgtgcaagtcccatggcatcttgcctgacagttgcattcagtcaaatcgattgacccatctctgcttcttcatacgtatgatagttgcatcgaatcaaaagtttgatccatttcttacccacctacactaatcctacaattatgtgtgttcacaggatggtacgcttcaagcggaagtaatgcgtgatcctgttatcttgccttctggatatgtaagtgacaagattgcccctttgctaggattttatccaattttgttttagataatggaggtttttatccagttggaattctgtataattatctgctgggtgttttcagttttgtttgttgtagctaatgttctgccaaaaagctaagattgtcagaaaccaggcaaattatctatcaccaattgacaaaacattgattcgttgtacttatacacttgttacactggatggtagtaattagtgtccttgtttaaatattgttatttacaatgcacttctagtttttaggcttcacttgccgaacactaaaatgcaaatcctcttggattagatttactcttgagtttgcatcatcttaaatcttagattcctattttttaatctttcaaatcaaatgctaaccttctcttggttctgttaaaattaacacccgcttcctgctttctgtagtagtttgaattgtcaaatgctgcttaggtttgatactttattcatgcacgttatgatggttcataagttcatcttatgatataatgactagaatgtatagtgatcctgaaggatagaacacgggacaaaataataattttaccctagtttctttcatttccattcatgcatagtcttttgcccctttttctataatatcctgtaccataacttatgaacattttggcgatttagcattctattgcttgatatattgattagtaaaactttttttttttgccacaataagttactgtgtgctgtttttctgaagttagctatggtggttatgttctgcaaatccaccatgatttggattatcccagtaaccatattttgcttgtttggttgcagtctgttgatcaaacataccaaaacaaccaaaaacggcagaatccatggacaaataccagcacatttactgatcactccttgccctactctctctctgttccaaaccaccttctccgtgacatgatttctgcatggtgcctcgatcactcggacctttccccatctaccacttctgatacaccttccactcccttggaaccttcagaggaggaacaaattcaacgcatcctaaaactattctcagggaattctgcatcgcaacgagaggctttgaaactgatccagctactcactaaaaccaccaaaggggtgcaaccttgccttgccaagtatgcggacattatcccagtgctgataaatcttaggaggaaatataaatcgagttggacacaagatcttgaggaagagaggctcacaataatcctcaatctgaccatgcacaggcaaaacagggagatcctagctggacagaatgaattagcaggtgctataaaaaaaattgttaagaaggctggcaatcgtggtaagcgaacatcatccttggcgaaggtagcttctatagttgctgtcctgtcagagtttgacatgttcaggaaaagaatgctggatgctggtggaatgaaaatgcttcgaggtatgctcaagataaaggatactgaagtgataacggaggctgccactgcgatccttgcactctacgcagatggtgaaggcgagcaaccagccagatttcatgaggtgcctcagatgctgctggaatgccacatgttcactgatgggatcctgcttcttcttgaccgtctgccaaaatccccacgtgttttcagaaaaatctgtgatcaggctttgcaattggtgaatatcgtcatggctgaagatgcaagtgggccggtgacacgtaagggcatcctctcagcaatttccttgatctacgagattgttgaaagggatgtgggtaagatgaatgcggtgaagaacatggaggatttcatcgagcggttgcgtcagctatcatcagatagattgccgatgcagaaaatgctccaggtggagagaataatcaggactctgtcagatgcgtttccagctcctacggtgcgagggcgatgccaagaacccagtggaagccgtcttctagcttgaatcttatactgttcttctgtacagatctcaaaaggctcgagattttacttctgctcgcttaactttctggagaagtttgaatttgttgactgtgcagcaatgtgatggatcacacgaacaattcaaagcatagacagaataactttgtttcacttcctggtgagagattgtaacaaatgattggtgttagtaactgaccgaattgaatattattgtgattctgtgtagtactcctgtatgaagagaaaaatcttgtatcaactggtgaccattcgtttcttttctcgagtgttacaattggtatataatcccttgttaataattttgtttggagcaatatttcttatatatagaacatcttctatgagcatcaaacttgggagtcaaatgcaacagcataggactcggacaagaaggtaaattatttattttttttaggggctgtctatatatcatgtgacagaaaatcccacctcctatcattcgaattttggaccattggatgtgctttaagattcgtgcagccccttaaccctaactcctcctcctccccccggtttctagatcatgccgccaccctcctcccgtcccacgcgcgatccgctgccgccaccaccgccaccgccccaccgcgccgccgcccgcctcgctggctggccggaaaaggtcaacggcgccggtgaggcccccccggcgagcccctccccctcccccttccccctccccttcccccctcactttctcctcatggcgcaacgacgaggtgcccccgccccgccgtcttccccgtctccggcagctccccgccgccggatccgccaccaccggccgccgcctcctaatcccacccttgatttgccctcgccgccgacgccggcccaccgccctcctccatccccacggcttcggcgccgccgccgcctcgctgcccgctggagtccaccgcccaccgtcggtcctccgctgcccacggtcatccctctaagctccgaggaaacccccctcttccccctcccccaaccctcctcctaccctcaccccaacctcaaaccctaacccgccggagttggggtgtcgccggcgccggagaagaagaggagcccgccggagttggaggagagaagccgatgcacgaatcttggcatagatccaatggtctaaaatctgtaagatttcatccctaaatttcattcgaatgccatatagcaatcccggtaaactatttctagttccgtataaatgtttgtgtagaagaagatctaacgaaagtcaagccagggcagagcagaagaggatcggtcgtccgggcggaaccaaaacatcggacaaacttgcaagatgctgattccagaaatgcttataattagccgtctgatgaaagtttaaccacatcatcagcgttagttgtgcggcatgacgtcatggaccatgaccatacagtctgaagaagcagtcggccactcatttaaatcccaaaattcaaatgattttgtctattcaactattcatccgatctataatctaattacacggttggatttattacgattatatctttataataagatctcacttgataatattttgatgggtttttagtttgttgcagtcttaaatgttgcacgtagtgttaattagatgttgcaataaatatttcgtggtgttcactatgtaatttgtaaatgttgcacatgttggcgttttgaatgtttcagcaatattttttatttttcaacaactacaacttgatgattgatgcatgctataacatagaacttaatgtttcgtctaattgttatcatggttgcagacaatatcttttaaatgttgcattctataaaatatttattaaatgagttgaaacatttttttttgcatgcgatgaaacaattttatataaataatgaaacaattcttttaaatgttgcatctctataaaatatttattaagtgagttgaaacattttttttcatgcgatgaaacaattttatataaatagtgaaacaatggttgactatatatataatttcatcaatgtgatatattattctaacgatttaattaagacaaatataatattctaatttgatcgtgcatcatatatgtatttttaaaagaaaatattgtgtaaagatatgtaatgaataagtacgtatatataagaaaatggggagagaaaaaaaaatagcaatgatggtcaaacaacactgcatgtgagcaagaggcatgctagttgctatgtggcagtggctacttgccagctagcagcgcatgcaacacaacagcagggcgtttttttgacaaattggtccttgcagaaaacttatttcgaaactagtccctaccaaaaactatatccagaaataggccgtcggatcagcgccaaagcggttggtgctgaggttgttcttatctgcgccaacgggactggcgctgacatcgcgccagcgtggcgggcgaggcgcgatgtggcagggcctcagcgccaatgcacttggcgctgacaccttgcacaccctaaatagaccgatgtgcggcaatgaattaacggtgtcgctcgtggtgcaacggtaagtttctttcttgctatatctgaggactagggttcgaatcccaggtcagccatttttgtttttttttaaaatcatcaatctacgtgcgtatatattaatgatgatctccattttcgtttttgtcttcaaatcttcaatgtacttttttttgtttaaattaatttttattaaaaagaaatatcacatttagtacaaatttaaaaagtagaagaatggattaaaaaaagtttagagacaacttttaaaagaaatatcacttttttataaaaaagaaattagaagaatggatttaaaaaaacttgagtttttttttaaaaaataaacaacaagttgagaactaagggtaagttttattctaaaatgtcacgtgtttttttaaaattaaaacaacacttgagcttgtaaaagaaatatcacttttttaaaaaatatttaaaaggaataacacatttagtacatatttaaaaataaaagaatggacttaaaaatacctgagctttgaaaaagttaaaaccgcaagttgagaactaagtaaaaaaaaagtttagtaaaaacataaaggagagggttcgaaccctggtcactgtaacgccacctttcaaatacctaccactgagctaagccaaacctaattgttgcttttgcttttgcttttatttagccagtataaaggccagcgccgctgtagaacatatattctgatatatatatatatatatatatatatatatatatttaaaaaacagagagcatcattaatcatttatatgtactaatgtacgcacgtagattgaagatttgaagaaaaaaaaaagaacgaacaaggctgccgtgatagggagtcgaaccatggtgctagggtacacaagcaaatggtcataccattgcaccacaagtgcattgcttattaatggccgcgcatccttttaattagcctgtacaaggggtcagcgccaaatacattggcgctgaggccctgccacgtcgcgtctcgcccgccacgctggcgcgatgtcagcgccagtcccattggcgctgatatgaacaacctctagatatagtttttggtatggactagtttcgaaataagttttctataaggaccaatttgtcaaaaaaacggcaacagcaggggtagaggggcatgcggagcatcgtctgatatttcgcaaattttcggacgtccgacgtatatataagacatgttgatgccgaatcgctctgattagcccaattgcaccagtgtgggctgtgaactattattgtaacggtttaaacatcttatatgtttatatattgtaaactagcaaggtgtcccgcgtaaattgcgcggatagtatcattatattttctctcatataatagcatatacgttttgtcattatattattaaaatatattacaatgacaacataattttaaattttgcaataactttacgaaactactgatgtgtaatatttatattgtattttatatacgtgttagttattaattatttttaatatcaaattttagttatttgtaaatcatatatattcctttatggactttagacttgtcttttaatatttttttttaattttgaatttttattatttctaattgtatttctacgtggactctaaactcatctttcaatattctttaatttttaattttaatttcagttacttctaaattgtattcctatcttaactttaaactcttcttcccatgttttttttaatttcgaattttagttatttgtaaattatatttttatacggactctaaacactacttttcattttattatgtttattctgaattttagttagttttaaattcctatatggactctatactctacttctaatatttcttattttttaattccgaatttctattttttttcttaattgtatttctatatggactctatactctacttctaatattccttatttttaatatcgaatttccattatttcctaattgtatttctatatgaactctatattctacttctaatattccttatttttaattccgaatttcagttatttcctaattgtatttctatatggactctagtctgctcttctaatattctttattttttaattccgaatttcagctatttataaatctttttcttttctccaattaatgtgagaattttaggtcatgagagcgaacgtggaggctcctttttattccgaattttagttagttttaaattcttatatggaccctatactctacttctaatattccttattttttaattctgaatttcagctatttctaaattgtatttctgtatggactctgctttttttctttttctccgattaatgtgagaatttctcggtcataagagcgaacgtggaggctctttttattccgaactttagttagttttaaattcctatatggactctatactctacttctaatattccttattttttaattccgaatttctattttttttcttaattgtatttctgcatgaactctatgctctacttctaatattccttatttttaattctgaatttctattatttcctaattgtatttctatatggactctatactctacttttaatattccttatttttaattccgaatttcagttatttcctaattgtatttttatatagactctagtctcctcttctaatattctttattttttaattccgaatttcaactatttctaaattgtatttctatatggactctagtctcctcttctaatattttttattttttaattccgaatttcagctatttctaaattgtatttttatatggactctactttttttatttttctccgattaatgtgagaatttctaggctataagagcgaacgtggaggctcctttttctattcctttaatctatatctatctatatctatataactaattaaaaaataagtaaggcttccggttaatcttttcgtccgtcattaagagtgggcccacacgataattcgtcgctaatccacgatccgaaagcgtggccacgatctcttacgcctgcaaataaaggagagaagaaaaataaaaagagaaaaccttgtttgtggagcagtccatccaaagcagcccggattggattagtgacgaggcagcccatccaaagcagctgcagaccggcccagatagcagccgcagcccaccagcgagcccacagagcggaggagaagcagcccaccagcccagcacagtactgcgcaacactgtagcaaccgaacacgaataaagtaaagaagagatcttattacttaaaacatgtagtcaccaataaaatgaattatttaccgacaaaataaattcttttttaaaaataaaaataatcacatgtgtctttcttttttttaaaaaaaaagtaatcaccaacaaattgaatcgtgtttacatttggattttttttccctcatcaattgctcattcgccacaggacacctaatcacatcactttttttcattcatcgtataatttcttctattatttagagtgaaagttattctgcgatataccacatttttttctttccttctgattatttaagtgagtggttatgcaattggagtgcagtgaggttaatctgatagctagcaaaaaatatatcttatattatggttactctttacaatatgaaaaaaagtgcttatcaatatcgagtaaaaaaaataacaaagtactgcaattgactcataataatacatgacaaaaaagtaaatatttttttgtggtttcaaagtttagtatccatgtcagtggatttagagcaacaaataattatatcatgttagcgtcttatttgcactagaaagattcgattcgactataaagacctcaatgaacctggtgtttatgctcccacacactaattactatttttttcttcccccagtacaacgcatgggcattttgctagtaatataatagatagattgcatctatatcgtaagtttatgcacggcaagcaccagtgtggaaattctcggatttgtaatgccgttttttttccggctgaaaccaaatagtgtcgacatccaacaacacacacatccagatgaaacaaagattaatgttctagcttggaatatatatatatatatatatatatatatatatatatatatatatatatatatatatatatatatatattactttggtgtgggtccttccaaaaagactaaaaaaacctatattctaaataagcataaaacagatataagttaactcgggaagtagaaacaaagcaaactactccctccgttccacaatataagaagttttagagttgaacacggttattaagaaaataagtagaagtgaatagtggagtccgttccataatataagaagttttaaagttgaacacggttattaagaaaataagtagaagtgaatagtggagtccgttccataatataagaagttttagagttgaacacggttattaagaaagtaggtagaagtgaatagtggagaattgtgattggttgggaagagaatattggtgaagaagttgttatattttgggataaatcctaagggctaaaagttgttatattttgggacggagggagtattatattattatgaaatttacattaccacacaaccatcaatcccgaccaccacagcattcctagttatttaaaaccatcactaaaaataatattggtatcacttttggtttttaaagtgaactggtactgaaagtctgaaactggtcgagcatgttggagtttaattcaatttaatcactgaagaagggaaaatatataagaaaagggagagaatctaataggtgtggctcattgatttttttaataaaaaaataatgaccagattgtgacgcgaatgccacgtagaaccaaaaccacttcagattaagtggggggatcgttatttgtcaagtttgaatagttaaatctgaaaatttggagacaaacatttagaataataaaacctttttcaaattgcatcacgctggtatttattggattttccctttctgtgccagtgcaaaaaaataaaataaataaatccagaggataattaaaaaacatatttaaattctaaattaaaatatgaaattcatacaacatttattaaaaacatgattacgaattaatttaaatcaataaattatattaaaaaaaggaaataaatattatttattttctaaaaccttaacatgaactaaaatatttaagaaactaattttcaaacttagaattaaaagtctattagcctaacccaactcacctaatccaaaccctaaaattcataagggctattttgaatagcaggattgaaaaaaaaaaaggaataggaaaaatgcagaattttgataggaatgcaagttcaaaatagaggattgcaaaacacacaaaaaaaacacagaaataatcttttgattagaccgcaggaaaaacaaaagaattatatgagagagatagactcaaagaaaaatttccaagaggttagagcacttgttaaatttcctttaaaatctcgataggattgtccatttaatagaaatttcaaagaatagcatatgattcaatcttttgtttcaaacactttcataggaaaattttcctgtagaattgaaatccttcgagacctatttaaagtctaatttggcttcttattcttctcaattcctttcattttctctcccaccaggccaaccaaaccaggctggcctgaccttcctacctccagttggcaagcccaagaagacagaccgcccctaaagcccatgccatgccctttctccctttccaccttgggcctttaacgatggggagttggggacctaagctagcaggacaacttcgaccttgagttctaacacatttcctcgggacgcttcagcgtctatggccgagggaggcgacagtggcctactagacggtttcgaggaagatggatggtggcggtgcaaggtatagtgaaaaccctaaccgatcctaacatctttatcctgcttccatggtagacaaatctcatggaaaaaatttgaaatacagacaaggaagaggaatggagccctcaccacggtgaagaaccaacaaggatcgagcgggaggtggattgatggccgctactataaagaaattatagatatttgcacatttatatagccaccttttctcttcttgccatatatatctcctctatttgggcatatgttataactggtgtatattggctatatatatatcagttccccctctctcacattgagtacgtgacatctcgtaattctctatctagatttaaatccagaagtggttttcttttaacggagggagcacatgatatcggagtctgcatttctcatgtctttccatgccctagcagcgccatactggtcatgcaccctctctttcaggcttggctagtttgcgcgcatatcctagctacgcaagttgcacagccacgcgcgccttacgccgatgagcatattaacactaatgacaatagttagtattattatttttaaaaaacaatacataaataatttagttaaaagtttttaaggaatagtttgaagttttaaatttgtggtagaaagattttaaaaatctagtcgaaagtttttgaaattggggtttaaagttttgaacattgagtttaaagttttgaaatttgatatgaaagttttaaaatttgatttgaaagttttaaattttgagttaaaatttatttttttttaaaaaattcagtagaatatttaaaatttaagttaatagtttcaaaatctagatgaaggttttaaattttgggcagaaagtttaaagttcaggttaaaagttttaaatctctatcaaaagtttacacaattttgacatactttgaaaataaattaaaaaataattcaaaagcataaaatcactaaacacttactatatatggttgatccaagccatcatgggtttcatccctgtgccatcatgatcatcggcttcatcctatgccatcttgggctttatgcgatggctcggtagaaaaccgtgtcgtgtgaggtagcctacccacgcatgtctgcaccaaatagagttttcactctcttccttgtcatgcaaactccatcgtgccacgcccatcctatccgtgacgtcctatttcgaggaccgctgccctaacgccgcacctccgccacgctcatcctccagcgccgcattctcgccgtgccgtagcatcacgccatgttgatcgagtccaccccagtccttcgcgattgcatcgtccatgtcggctaagatggccaactgatccctccttccaccaccggcagatccatcagagctgtcttcgtcaacccctatgctaccgtcgttgtcaagtcacacgtccttttttttttggaacgactcgtacgagaaggtgcgaagttctattgatagagcagaaaaaaattataagattacaaccctgaagggtcgtaattatcgtaattaaccaggaaaaagaaaagtcacatgtcctaatcacaccataaagcttaagcacccaaacttcaacaaatggaaggcttttatctcaattaatgtgcggcaagtttggcctctcctcaactacggccctgtttggagaactagccaagagttattttgagagctattttttagcacaagaaaataactctccaataaaatagctctaagttgtttggatcgaagggctattttgagagctatctggcttttaatgtaccttctcatggagagagatagagagaaaagccactttttcagtgggccccacctaaaatagccccaattagcaccccttgggtgggatagttttttgggtgggctatttccaaatagctcacccttttagatctttttgagttatttaggctatttgagggagggctaaaaaatatcccttagatccaaacagggcctacattgccatcaccgcccccgcacgccaagacgactcagcctaggaacaagccagctgcctactgcaagaaatcggtgagacggaggtgcgagaaaatagacaatatcaaaggttaccgaatatggaggggcagcaagaaagtgataacgaacgagtcagtaaattgaggcccactggaatgaacagtgcatattattcagcactgaaaaagattgtgcgacttgtgctccggaccaaccagttattgttcgaggcacacatgacttgtcccttaaagatgtggactgtactgaaaaagagacgtattacctactgctgagcaagtttaatagtatagcctactaccggctttaatttatttatagccaatttaatagccgcttactatactattaatatatggtcccacctatcatacacattgcgtcttatagttcgtgttgaagctggctacagatctgtagcccgctgtttttctcttatcgtttatctcattaaaatatgtttatagctggctaatagtatgctattgtacctgctctaatgagtgtgtgttagcggccagctcagccctcgacctgcctgcacgttcgcggttaggtgggcttttctgtcatgttagcagcgacttgtttggttgggttgggtgcaaagatgaaagatgaaagagctggaagatggaaccagacctcgatcaagctacagcggcggttatacagtaacagccacatgactaaatatttaatatttttagaaacacagtataaatataaatgtacacaacacgcacacaattatctctataaacgtaaatacacacacatatctctatgagtatctttgaaagagtagaattaggatgtgtcatattttaagattggcaaatattgatgaagtatccatgcacatctcgatatcgatatcgataggtacgttgcctagcaccaacaaaataattagccgtaaaaatgagcacgtgtcaattttgggacttaaacttaggggagtaagttctgtcacttttaaaatagtatagagacatttgaataatatagacataactcgtaccataagtttttttttcacttagtggatttatataattaactattgttaaattgcagtttggatcactttattaccaagtttaactttagcccaccctttgttccatccttttttactttggactagttaattttatcattatatagtaatttggaccatcccaaaccatttcttaaccacatgaacgaccttgagtacattatctccaacacaccatgacccctctcttgtgcgcaagccatatcttttgttggagggatgtggttaaatatggcaatagaagagaattatggtggttaaagtaaaaaaatgtaaatttaactggtctcgagtgaaaatattagttaattaaggtgatctaaaataaaacttttgaaacaaaaggtggcttaaatttcaattgagaatccatagtggtatatatttgctaattaacattaacaaacggcatcatccttctccactattttcctcctcctgatgtccttgtcatttaattaatttcaacatggcagatctccgtcgtgatggtaacatcagcatattttatatcatccatgctctaatatatttgaaaggtacatatattctcattaatatataggcatatatctagtagggaaaaaagaaacatgcacctagtcacctagactcctagagtatccgaataaatcctacctacaatactcacaagcttcacgccctagtatgttataacctgccactaaaagagaaggaaactatgcagatagtacaggtacgtactacctcattcgttccaaaaatatcaggattttatctatataattatatgaataaaatcccttatattttaacatgtaaatactagaaaacttattgaaacagtactgtcagtaaaaatgagggggatcaagtgaccagtcgaggaagcaaagctgagttttccacaacgcaattaatagcaaagagaccgacgatctgaagatatgatagcagagaatgactttaatttcctggaccatttgtccaccaaccgctgccaacggttttgtcgacaaataaccgagcagtcattaataaaaccagtgaaattcatataaaatttaccaaaaatttgaattcagttcatcttgtgcttaccaaaattttgaaactcagctagtttatctgcagccccatcgtttcacttatacttatcgttcgacttataaacaaccaaaatgagataatctatccaatgtcatctcattttaacaatttgacattaatattgtctcttaatataatataccagcgagtttatcgattgttctaactttttctttcaaaattacccaaaatatctcaaagacatataaggttaacaatctatttattacaataaaaatttcaaaaaaaaatatgatttttatatagcctccttatacaacatggaaagtagtttgtatataactttcaagataatttttggtattttatttttttaagaaagttattttttgtttggtatataatagaaaaaatgtgttgtctaggtttttaaagatttgcattgaaaacaacaacacatacagcatatagcagataaattgtattatgaaaaaaatagaaaagcaaaaatactgaaacttatatattgtgtaaagaggctaaaaatttcatatttttctgaaagtttttgatagaataaatcaattgttaacttgtatgtttataagggtgttctaggtatttttaaaaaagaaacaagcatagtggcatattatagaataattagtaaactcgctggtttattatagaagggacaattaatgtcaatagtaaattattgaactaggacaaatttagtggtacatagtaaattttctccaaaataatttttgggtaaaacttccatatacgtgtccttagagattcaaaagcaaatggtgtgaaataaactatgataagaaaaaccataaaatcaaatctaaattaagtgttgaaatttaaattttggcttataaatatacgcataagcgaaacaatggagtggctagtgttttctaaatgcagatcgagtaataaccggggtaatgcattttgaagccttgtaaaaatgttctgtagcaacattaatatcctgtttgattttagactattcagcggattattgcattggacaatctaggtgatcacatgcataaattaaatattttcagaaataaacttaacgaatatgttaaaacaatgatctaagtaatgcaatagaagaatttgttttagaaaagtatattttttgaagtgtggagcaaataatttgtttcagcaatctactagctagtacataagttggacaaaaaagggtctaaaccctccacaacttggtttaagtatcacataaaaattaaagaggaaaaaaaaatccaaataccccctacaagtcactagttttttcaatgtcctccctacaaattaattccatgcacaccatgctagagatccacagtatgcgaggaatcgctaagcgcgatgagaaatcaataaaagatagatataggtgagaagttggaagagaaaatggacttgtgagcaatgttttgcatgaaactaacttgcaggtgggagattagaaagatcactaatttgtaggggttattcatattttctcaaaaaaataattatttatttcatgcaaactgagcatacctcaattgatttagtttcttgtggtagatcctacctgcttggattccggtcctactcttggtattggtgttcgtatttaacgctaattatttttttagtggtatgtggcgtaccaactagggacttgtggactttggtgactatgttaatctaaagatagtagatgatgcaccgcgcttcgcggtggaatacaagagtgaatataagttaaatgttgtagaaataattgaccaatttgggctgaaatattgtaaaaaaaatgatgtaaggaatatattacaacacatgcttatatgtttagctttagaatataataaattgtatatgtaatggctatgcttacatattgagttttatagatacttggtgggttgatatgtcatgcttgaatgttatgctttaggatgtactatcgataactatgtttgcatgcatgttgagttttaaatgcttaatatgctttgtaactatatagaaagagtagatattgatccaatatatcaggaggggcgagtttatatgggtgtgtacttacatgagtgtctacgttatgaatacgtactttgtgataaaactattattgctattttgcttttgtaatacactacaactttggtactgctattaattgtctgtgttaattagtatctacattaaatagagataatttagaaaacaatatgacatgtatacatatgaaagataattatatgatatccaatatcatctatctctcctttttctcgtaactaagttatcccaagctgtctaaagaaacgataactcatttttctctctcgctctccactctcatcgacgtcaaaaaaaagtattaacttacttatagtgtcccactaattgctgttgtatatatcctaatccaccaaactgtaggagttgaatcatttttttaatgtgagttaggttggttatgcacaaatatgactagatgtgtgtattgtaacaaccaaatcttcatgggctgtactctaactcgccacaggtacaatttatcattatattttaaaaagcagatatcaatcatacccgttaattaaagattacacttatatttaaaaaagaaaagtcaattttactccctttaactctttcatccactacactggataatgtcacctgtgacgggcccaaaccctcacctttgacgggtttgggcttggtcagtgatcagtggtcactggcaagtccaatcacctttgatgggtgaccggcccgtcagaggcacactcacctctgacgggtccgtattttccggcctgtcaaaggtgaggatctccacaagccaatgtgtagttgcaacccatcaaaggtagacacctgagactcacctccaacgagttcaagatatgaacctgtcggtgaaatgggcctgggggtacgcacagtagagggaagtgtccttcccgtctagtcgcgcggccacgcggcctcgcgtcctcctgccccttggatagcgctaaggtggccatgggggcctcggggtgccacgtcatacccctcgggctttcggggcgtgctaccccgaggccctcgcacggccaccacgtggcgaggagagcgggcggtgcgaaggacgcctcttaggatctttaatgcgtggcgccccaaccgtccctcaccgcattttaacgcggtgtgggtggatgtacggcgccgcccgattgacccatgtcaatcgggagtgactggtctgtgaccggtcacaggtgattgggcgggcggcagcgcccccacgtcccgccctgtgtcaggcggaatgggggcaggtacgccccgtcccgtcagtatgctgccaggggtgccctccggacgtggtgagccaccaaagtctccatgcatttaaagggggaatgacagggatgtcccccgtgtcaggcgggggacggcgctgggccccacccaaggacgcacagccaccttgcttccggttgaaggcacgaatggcggtctaatcgaggcagggtgggttcctctcccctggaggagtaggtatggacggtgcatgtggtatccccttgaactataaaaggaggacctcgcccaccgaaaaaagtgacgactctcagatagttttgagttcgagaggaagaacggctagggtcccctccagagctcaagacatcctgtaaaagttgatcataatcccatgcacaggagtagggtattacgctcgatagcggcccgaacctgtataatcctttgtcttccacacagccccgagagcgatttagtagttaaacgccaagccgaagtaggcccttgatcatcgcgctgtatcccccggtcgaactcacaaaggggggggggggtctcacgaccacccgctagagagggttgctcctcgacagaacccatcactggaatggaaagtcatcttaaaaaaatggtgcccagttgcaaccatagaaaattggtaatagaagccgaagaactaataattaaccccaaacatttcaaactaattcctttcaaaagatggcaagaagccggagaacttacaagttttacaataggaaccgaaaaacaaactacaaaactaaaaactactgggaaactgcatttcagggaaattgttaagattctaattttctagctacatcacaacgaaaaaatctctagtatcttcaagaaaaacaagacaaaagttcacaggtcttcttctaacatcaattaatctccagcggcaacacatcatggggcttcaacaagaccacacccgaatcaaaaacttggaatcgatgacttgcaagatctgaaaccaaatcgtaagcacataaacacattaatcagtacttgggaatggtggaggaagctatggcggtggccgcgcgaggatgcaggaggaggtgactagctctcggaggagggcgcttggggacggaagaggagaaggctgtccagtgccggatctggcgtcccccgacctctaggaggctggatccagcgtcccccgacctcagtggtggcggtggcggtcggtgcttgaaacggtgaggacgacggccggtgctcgcgcgtggagttggaggccgccgccggatccggtcaaccccgacctctaggaggcgaccgcatctgcacgccgtcaagccctcctcaccgccgccatgcaccgcgcactgagccacgcaccagatcgagaaaataagagaagggggaggagggaagaaagaagggggaggaggatggggtaccgccgaaccaccactgccgcctctcccgagggccgtcgggtcctccgccgccgcctctcccgagggccgcccggtccccttttgtttctgtgagtgtggataagggagagagagaggtccccttttgtttcttggataagggagagatactatatataaaaaatttgaatttaaattcaaatttgaatcgggtatgtaaacttttgacttataaactttgggtctatagtttttaggtgtataaactttagatgtatagaagtactatatatagaaaatatttgaattcaaattcaaatttgaatcgggtacgtaaacttttgtcttataaactttggatctataaactttaggtgtataaactttaggtgtataaactttagatgtatagaaatactatatatagaaaatatttgaattcaaattcaaatttgattcagatataattcaaattcaaatttgaaacgggtatataaactttaggtctataaactttaggtgtataaactttagatgtatagaaatactatatataaaaaattatttgaattcaaattcaaatttgaatcggatatataaacttttgacttataaacttttggtctctaaactttagatgtgtaaacttgaggtgtataaactttaggtttataaatttactaaaataggaaagtaatgcggtgccaaaaaaggaaaccgggtggaggggtggagggagggaggggggaggggatcgatcgctgccccatccccagggcgatcgatcgccgaacaacatttccgcccgtccatcactctctcccctctcagtctccctccgtcgctctccctgtctcctctccctctctcctcgatggtgccaatgctcctccccaccgcttcacaatcacctggagattaggggttgcagtggtagcccctctctagtgggcaggccactggatctggtcgtctggaggttagggtcaccggatcacatcccctcgttatttgcatgtcatctaaatagttatgaaaaaaaattgagaagattattaatatgtgatatatcattcccacaaccatacaagttgaaattcaacttctataagtgttggtatttcttaacgacattactagaaatataattcacagcaatggcgcagaaatactcatggtatattatggctacagagttcatccgcgagcgcacggatataccattttagcatttcacccgagagtattccaagggtatcgtatttatttaatcccgtgggaagatcatagtagagagaacctgactagtaatttagatgttacttgtaataatcatagtttaagcaggagttaacataattcaagggtagaatgacacacaagcatggaactactcattctcatactaaattacctaagctaagttgaaagaaaatagaaagataatctattcctatacttctagtatatatagtatacatacattctagttatctgacatactagctaataccctctatccgatgctctcctggtacttcaagaagccatccctgactgccgagttccttacgacagcccgtcatgaccatacaaccggggctaaatacggaggagtagcctccctaggaaattaacttagaactatatacactcacggaggaatacccgtactgagctgtcaccatcagcggccgacctctcatccgcagcatataaccccaaataatgatacaccgtaatctagacactacgcctaaactaccagatactactctaatatcattgtcatgacatagagtaattgcataagcaaacactatacccgtaccaatgcatctcccagataagctagcagtataatcagtataacacgaacataatgtaaagttggcatttatatatttagaaagtatttcaataccataaatgtataaagaagagtattctaataaaagtacaaagcttacgaaagagaagagaagagctactagagccatacccgaactcttccgaaggcttccggactccgatttctactctattcctactccactagcttaagactactaaactaacttgagagaatatgagagagctcttgcttgaggtgtgtgagtgaagtgaggatgagagctccttttatatgcaggtaatgacggttatgatggttggaaatgtcagtaatatcctccaatcgtcattggggatcaatcccagccgtccatcaagaccctgcatccattggcgccacgggaggttcggccaaaccaggggccggcccaacctggcctaaacttggcatgtggcctcctcctttgctcttatacgtagacttatgaattttggcccagttcatcatgtcaattatgagttcttggcccattcatgtataattttgattctcgacatcgtccgattgatctatcgtctgatttgatgtcgatgctcctccactttatgattattctctgcaaaaagttagtgaaccaaatactagtgaaatattattattctaacatggatatgcattgcaagcataattagttctctattttggtaatattgacggtcgaaactgatcgctaacgaccgtcaagaataagttaaaaaaaaataaaactaaactatagctagtcgacgtatatttacaattaaatttgtttttttcgttgtaacattttagaagttaaatttgaccatacgtattggtggaatgacctatcacatagtaatttgatttttttttcataatcatttaaatacatgtaaataaagagaagatgtcctctccataatagttcccatcatattcggcagccacgtgcattaaagtgactgtacaattgcagcatgcaaccactgtacgtacactcttaaattttaacctgtacacttgtaattttcaacggagaatgctagttgtcaggcctccgatgagaggggagaaaaatcagacgctgcatggtctgccatttgtatgcaaagaatctttccctacatgcttccatctctcatttcttcaaaagattttttctcataaactatttatctaatgtacgatctgattgcatcactaaattgttacaattaaatctttacaacaagaccacacatgattatattttaataaaaaaatattttaattttttattgatttttttaaatgttgcatatggtctcttttgatgtttcaaccagtagttttacaatgtttcagctagtgtactcataatgtttcactatgtacggatcaaatgttgcagtgaattttgatattatagaacacgctgttacaaaaaaaacccacgtattttggaaacccctattaagggaatttgttttatttttttgttccaccaaaaagtttcacctaatgtactcacaatgtttcactatttatatatctaatgttgcagtgatttgagatactctattgcaacaaaaaacccacatattttggaaaccctcagaattagttttattttttgttccatcgaaaaatgtttcgtttagtatacccgcaatgtttcactatgtatggatcaaatgttgcagtgaactgaaacattctttcgctatttgcccgtaatctagacactacgcctaaactactagatactactctaatatcattgtcatgacatagagtaattgcataagcaaacactatatccgtaccaatgcatctcccaaataagctagcagtataatcagtataacacgaacataatgtaaagttggcatttatatacttagaaagtatttcaataccataaatgtataaagaagagtattctaataaaagtacaaagcttacgaaagagaagagaagagctactagagccatacccacacgtctctgctgatcgtcaatctccaacagggcctcctcgtagaagtcgtccacagcctcagcccatcgtgacagtcgggtcattatcgggctgtagcagcaaggtgtgtcctgaactgtgcagacggagttgccctcctctcgaaacgggtggtgagcaaactcagtactcgccaactcagctcggtggatagagctaagtcggaggaaggcctcccgggcagcatcctgcatcgcgatctccggcaagtcgcgacggtggcgtgtcgggaagctgtagtctaactctgaaggaactctggtgtggacctcgacccgagcctcccaaacagatccacactgtctcactcggtagatcggaaatctggggtatcgcagacgccttatcagccggtgtagctcaatgacgtatccctctgagcggggtacgcccatctcccaggtggcgggtgaatccggatctgccatctaattttaagaaaaacccaaagtcagttgagagtaaaacttgttttgtaaagaaaatagttaagagtaagatgaaaatcgtaccgagttttgtaaacatagcatttttatttttgaaagtattactaaatgggaatttctcccttggccaacttagaaaaggggtggggtgccttttggtcttttcctacagtcgtatggctctgataccagctctgtagacccccgtttttataacaggaatcaatcgtgtaaaccgtaccatttccctggatcaagtagtctggtatacacgaactcatagctgaaatatcaagtgcacatacacgagagtctagtacgaattattacatcataagcccacaggcacagtcttaaatcatcggaccgagcggtccggaatacattccaaaaacagaagtaggtaaggcagcggagttaaggcagcggcacgccattgccacaggcaacgaccgtaactaagacctactgagcgccatcgtcctcatcaccctcctggtaataggcatagggatcctccgaagctttatctccggcctctgattaagtttgaatattgcaagggtgagtaccaaccgtactcagcaagccaccacagcaataatgcacatgacagaggaattcaaaggatggctatggttcttctgcgcaaagcaaattttgtaattcttttcacaagcctaagacctagcatagactgatcaagttttaataccaatgttcacattaaacaacgacggttctgtccaccatccattgtgatcccaaggatagctttccgccattgagtcgtcatggttttctgaggacgtccacattcccgcctctcaggaagtggctccatcagcataaaaaaaaatcatcatgtaatatcccatcccacacaagttaaagaatttagagtctagccaagtgtaatacatgtcccggtgctcaataaccgcaagcacggctattcgaatagatttggtttactcacactgcagtggatgtacactttacccgcactctgcgactgcccaacacatgagcctcgtcccaacacatgagacacgtcacggcaaagcttttcgataacctcgcattggcagtacccgctccatgaagttaaatcctcatgcactctaggcgtccatgtttctagtagtgagaggagttctggcgctcccgggaaagagaagtcttacacacatattaaattatggttcaagttaagttctctctctcacacactcatggcagtcctaccaatggcgacaccgatgtagagcacgcctctcggccctacctcaacggctgccccaccgtagcgcacctgcctcactcaggggtgaaccatctatgcagggatactgccttcgctcggctatctaatccgctaggtctatacccattcgagaagtacggttgtatggggggtcgtttcatgcttaacttcatggctcggtccttaattgaccggggatggtactagccttttccagataccacccaaatcctccgtccgctccagtcgaaaaccgttgttttcattttattttcctttcccaaatcatgtcatcaatttcttggcaatgtggtgctcatgtctccacatgccgcatctcaattaccttcccaaaggtaattgcccaagcatttagcatttgataaatatgagtatgcataattctagaatagcatttctaagcaattgtcataattgactagggactcatatgtaaacatggttatgaaggaataagggtaactaataatcaaggcatggtatatacacaagtaggatgttcatcattgcatgcaattttatttataaacaaaataatttcgcaattaggatcaacatgttcaagggatagtgatgacttgccttgctcaaagtcttgcggttcttggtcctcgcttggatccgcaactccctcgggctctaaaattacgtgcgaagaaacgatttgaattcggttaaaattcaaataaagacccaaataaatccaaatggaagttgaatgcgaaagttgattcttttatattaactttactatttgcgaactagggcaaatccaatttcgatttatacatcctaaactattttgcgggtataaatattttgttagcataagtttttaatttaatctacccgagcattatatccatataatagttaggaattttctatcgcgagctaaatatccgacggtatccaaaaattatcttataatattatacgatataatttagcctatgactaaccgattaaatataatatacgtctaaaattcctatctaaaatttctagtgattaaattcgaacttctaccgtgaatcgattacttatagagattatccaaaactaatctataatagtctataaaaattcatctaattgtttagtcgttaattacatctaaactactaccgcgagttgatttcttttagaaattaccaagaataatctataatttatattaaattttgcaattctatgaccataattaatctataattaaattctaattattttagattttcttaaactattaacctccttaatttcttcctaattttctatttatttttccttttctttttctccattctctcttctctctttcttcctttttctttctctttttctttcttttctctctttctctctttttctctctgccggcctctcttttcctctccctctctctctcggctctctcccacccgagcggcggcggtggtggacgcgagggggaaggagggcggctcaccggcggcggcagcggcgacgacggtggcgcacggcggcgcgggagcggcggcacggtggcacgagagcggcggcgcggcagcacgggaacggcagcgcggtggcacgagagcggcggcgcagtggagagggaataggggaggaagggtgagatggggtgggggaaaatggagagaggggggggtatttgtagagaggggagaaggagagggggaggggcggcggcgtaatggcgacgcgatggcggcgctcggggcgggacgacggcgacgtgcgggcggcgactcgatggcggcgcggggctcagagcggcgatgcgacgggcggcggtgcggggctctagacgagcgacgcgacgggtggcgtggggctcgacgcggcgatggtgacggcgcgcggcgatgggacggcgacgtggcgggtggcgagcgagcggcgtgacaggcggggcgacgcgacgcgcgcggcggcacggggctcggcacgatggaacgggcggcgcggcagcggcgcagggcgacggcgaggggacggccgcgcggcggggcgcaggcgagaggggacgggcgcgcggcggctcgaggcgcgaggccgacggcgacgcgacggtgacagcgcggcagcggcggcggcgcgcgcgacggggggcgacgcggcgcacgcggcaggggagggggcggggctagggggaccacgatcgaacacctatgccgcaatgaacagtaacttttcctatttatcccattttagcccattttctatttaaatatagccctataaattctaattttttgcataaatgaagtttactccatatttgtgttatcctaactaaaaattcaccctaatttaatatcactcatattttgtttatataatttatttgaatttttaattagggttaattctcattccatcgtactaaaatttaattattgctaatatggtcgcgataatattttatttatttccaatcccacctaatctttattttaatttatattttaattatttatttagccaacttgatttttagggtttattcctagttagttattcattattcgcgattaataaattccgagatcaaaatccaatgaaataggcgaataaaatcggcatgatgcaatttattacttaaaaagtttttgaaaatccgtatttttggtgttttgatttcgttggtcgaattttcagggtgttacacgacggcatccatcggagtgcgcatgtggcagttgagatagtcgaggaggagccgcctccaccgctcgccgcctccgccactcaagctcctccgccccactgttgttgtcctcttcacgtgctggtggaggccgtggagaagccacgcggccgtcaagtaggcgcgcactgactgatgctgaggaggagccgcctccactgctcgtcgcccctagccgcctccgccgctgctcctttgccctgccgcttgttgacaccagccttgctgattgacagacgtggagggataagaaagtgagagaaggggaaggggaggggaagatatgataggtgggtcccaccaattttattttttagaaaatgctgactggactgccacgtaagatcaaaaccactccgggttgagacaacgggtaattcgtccggtattaatagttgagagtgaaatatatgtggctttcgggtttatgggggtaattcggtcgaccataatagttcgtgggtacccatcgtattttttcaatggcactacgtacgtatgttttttttatttatcgtttttatcgtaagtccgtacgtatgttttctttcgcctatgaacagtaggtaaagcttcatcttttattttccagtcgtacgtacgtacgtacacggagtattttgtttggtttcttattccggcccacaatatacgtgaggaaattattagtttttttaagtaatacatctaatctaatgatataaaatatcggatccaccaatttaagtgaaaatcgacggtgagattaaacagtgtcatgtgacggcgtataagtatttgtaagatcaccacgtgatggcttaagagtgtttctataaagtttaatagatttttactatataatagattaatatttttaatataaaattttttgcttcctataaatggaagaaaggagagacgaggtggtggtggggggggggggggggttgggcctagttcgctaaccttcgcgactagagaatcacgcgaacagttacaaatcctcatcctttcttaatcacgtctctaatgacgcaagaaaaaaaaatcacacacctaattattttcacctattttttcgttttagttataactaactcgtgcatatgcttttatcttttttcggatttcagtttgtttggaatgaatatccagtaaagtttctatttacaaatataatatctatgtaaagtttatatagataaaatctatctctatatataaactttatatacataagatctctatatataaactttatatatataaaatctatatatataaacttttttacataaaatttatatatataaactttttatataaaaggtctataggtggaaatttttcgcggaaatagttcatatagaaaatttccagttagaaaaaactataatggaaaaaggaaatctgaaaagaatctgaagaaaaaaaacagaaagccgctaatatcatgggttgcaagaaaaacgtacgagaaaaaaaaagaaaaataaaaaaccgatgagatgaagacttacggaaataacgtacgaaaaaaaaatgaaaaaaaagcacataacgatctcccgtcttcaacccattcgtgagagaagctaacggcgaacgttcgccaaccagtctttcccggggggggggggggggggggggcggtacacgttgggtatgtatgtgacggaggggatacgggtgggttttttttttttaacataagatacatctaatggtgtgaaacgatgggtccaccgtgttaagtgaaaatccatggtcagatgtttgtttcttttctcggaatttctataatttgttagagcgccacgtggtggtattggagcgtttgtaggagccatgtggcggcttagaagcgtttgtagaaagtttaatggacttttagtatataataatagataaaatgcatgaaaaaggttagagtttggttccaactacataaactcaggcaagtctctgttttgatcatgttgatagatgatactatttcaacttaaaaacctagtattgcatcgaactatattttttttaataataacattgactatgatgatatgattggcaaaccgatgatggagatcgacgggatattagtatggtggatgggggggggagctcagggatgtgatgattgataatgatggcaagtcagggctctctatatatggtgtataaatataagggactaatcaccccctcacttgtataagagaaccctatatacggtgtcgaccatagatccatcttaagacgggctaaacctagtaccttatcaagtttattatgcttcacatggttacgtagtagtaggatgggagatgatataaaccctatgaatgtcaataaagtgcattccaggcgcatgtagtactgcgctggtatggagagctgataggctcaacacaaacgtggagtgtagtaaattgaagtaggagaaaagttctatactcttggcatggtgctgcatctagtgaagtgcgacagtcaaacatgttaagagtagctatgggtacagtgatataatcctgcgcagtgctaaattcaatcgtaatacaccccaatgcaaggttacaacccgtcacaggtaacttaccttgacgggtgcgttatattcggctcgtcacaggtatatgacctttgacggggtctagtatcaaagccgtcacaaatgaggtcacctgtaatggctttttgttatgactcgtcagtgatgaggtgaaatttttttaaaaaaagcaaattcaaaatattggctggcctcaagatttgctagccatgtcatctgaaaaacagaagcattacagatatatgccaggcaccccaatatcacatattccccatttcagcacatatgcatcacaaaatttacatcattcacatattcccatagaaaaaaaaagaagaggttagagctcattgtctattttccaatggaattggtgtataggaactcaatccataggaatttggtgagttcaaatcctttgttccaaatggcatgtgtaagaaaaatttctatggattgcaatcctcaatttttcctatgaaaatcctacaatccaaaagagccgtaagtgatgtaaagccaaattcaaatataaatagtattttgataagaaattataaaattttattagggtcggctgccccgataaaagggtgccacaccctactacctaccacatttgatcaatgatcacctagttccagtggacccaatttccccaaaaatatgatacattatagttatggtattaaccaaacgctagctagctagttaagttgataagaagtaatgtcatacgtagagtggtagagtaaacaacctctcagattacggaattataaatacggcatttcgataaaaaaaatgtctagctgaaacacgagcttgattagaaatatgcgggctgtcatatctatacctaattataaaataagtaaggtttccgggtatgttttttaatccgtcatcccactcacctcgctaaaatccatttaatccattttaatccgtttaatagtcaggtcggaccattgatatagaatatgtaccttttcatgtaatcactaagcacaagttacagcctgtctatctggttaaggaagcaagtctccactcaggccaccatggtttgattcccaccatcctcattcttttacacctattattcgattcccaccatcctccttcttttacacctattattcgattctctcctgggccaaattgacctactctatcaaaaactctctctacctttcctccctcatctcaattcatatttaatacctattcaagtatacaaaataaatgccccctttttctgtaaaagaaacaaaaggttactgcgcatgcaaagggcccacaagcattttgtacggtgtcaatctatatcgatatctctactattataaaaattaaagatgtttttaccggtaatttgctacgtcgtccgtgtttgagtcggttttgaagtttaattatttttaaaaatacatatacatatttgagttggtttttaaattctttcatttctagaaatacggaaggagtcgcataagaaatctctttaaaaaacttttatgctaacttaaattgattagactttctaattacagctcatgatattgtaaaaaaaatataaagtaaattcccatagtgaattagactaaaatagcattcacccgttgtaacgcatgtcattttttttttcagtacaaaatataaaaactactactcgacagcaaccacgggacgatttcatcatcgtgtgtgcacatgcagcgaagtcccagctacctggcgcgtgcattcattcatgtgtggatagacacctcctgaactccaccgggagagagaccggatcgacctcgcgctttctccgtccaatcgaccatgccgacggcgtcgccagcccacgcggtgttcttcccgtacccggtgcagggccacgtcgcgtcggcgctgcacctggccaagctcctccacgccaggggcggcgtccgcgtcaccttcgtccactccgagcgcaaccgccgccgcgtgatccgctcccacggcgagggcgcgctcgccgccggcgccccggggttctgcttcgccgccgtccccgacggcctgccgtcggatgacgacgacgacggcccgtccgacccccgcgatctgctcttctccatcggggcctgcgtcccgcacttgaagaagatcctcgacgaggccgccgcctcgggggcaccggccacctgcgtcgtctccgacgtcgaccacgtcctgctcgctgccagggagatgggcctcccggccgtcgcgttctggacgacgtccgcttgcgggctcatggcgttcctccaatgcaaggaactcatcgacagaggcatcattccactcaaaggtacgagacgacatggactccaactctccatcaccattgatgcatcttgttaattactcgagtacttctatcgatcttgtctcgaagagcagacgctgagaagctgagcaatggctacctcgacagcacggtggtcgactgggtgccggggatgccggcggacatgcgcctgcgcgacttcttctccttcgtccgaaccacggacaccgacgaccccgtgctggccttcgtcgtgtccaccatggagtgcctgcgcaccgccacgtccgccgtcatcctcaacacgttcgacgcgctggagggcgaggtcgtcgccgccatgtcgcgcatcctgccgcccatctacacggtcggcccgctccctcagctcaccgccgcatcacacgtcgtcgcttccggcgccgacccgccagacacgccggccctgagcgccgccagcctctgcccggaggacggtgggtgcctcgagtggctcggccgcaagcgcccgtgctccgtcctgtacgtcaacttcggcagcatcgtgtacttgacgagcacacagctcgtggagctagcatgggggctggccgacagcggccacgacttcctgtgggtgatcagagacgaccaagctaaggtcaccggcggcgacggccccaccggcgtgctaccagccgagttcgtggagaagacgaaggggaagggttacttgacgagctggtgcccgcaggaggcggtgctccggcacgacgccatcggcgcgttcctgacgcactgcgggtggaactcggtactcgagggcatctccaatggcgtacccatgctgtgctacccgatggccgccgatcagcagacaaactgccggtacgcttgcacggagtggcgcgtcggtgtggaggtcggcgacgacatcgagagggaagaggtggcgaggatggtgagggaggtgatggaagaggagatcaaaggcaaggaggtgaggcagcgtgccacggaatggaaggaaagggcagccatggctgtggtgcctagtggaacctcatgggtcaacttagataggatggttaatgaggtcttttctcccggtaacaatatgtaaaatgtcgagatttgctgttgtttctaaatgctttccatgtcatataaatttaaataaggacgatatgtgtagggggcacataatatgcgctcagtcgtgcgggggcacgccccacgcggtttcctcctctagtctcttatgtatatatttatatatgtatgtatacgttttttttacaatatcgatatgatacaaagtttatttatacaaagtatatacgtacacattggtttaatacacactgatttaatgatttaacgaagctctaacggtagacgtacagaagatatatgtgatattctgggccatttagaatttggcctatgaggcccaagagccatgtgtacatgtttagtaccaccttactagtttagaaagggcggaatcagcttataagatctcttcccttcaaccataccactttctggttaacccttttatcaaaagagaagacgaaactgtaagtaggtggtatgtatgggttgggagggagtggaagtgatcatagaagggatgttacagtatccaagcaaaattaaaggagtaggagtataggagggatcaagaaaaaatgttacaatatccaagcaggggatcaatactaatactagcggtaaaagagataatagtaaatttttggtggtgaaagagagaatatggttgtaacgaagtgcagtagtaaagataattttttttccttttataaagctaattttctatccctgaaatcgtattgcgagctcccagcaacgaagtgtagtaaagagaatttttttttccttttataaagctatttttctatcagtattgcgagctcccagcaaggccgcagcatatgtttcactgcaagtctaacaagagcctactcgtcacacggtcactcacacccggtacgaccatgtcgcatgcattaatatgatcgtgctccgcacgatgagcgtgtgtcgggggtgcatgaacctgaaccaacagtcctacaggtatgctatcatttattacttagttacttcctccgccccattttaaacgtaaccataaattttcatattcaattttgatcatccgtcttatttaaatgtttttataattaataattttgttgttattatatgataaaacatgaataatattctatgcgtgatttatgtttttttttattttttcatatatttttgaaataagatagtattgaacacgaaaatttatggcttcacttaaaataggaggagggagtagttctgaatggctatggaatgggaaatgcacgcatgcttcttaaacagacatgacagttgatctgttgatctgactgctccaatgcgataaatattttctccgtccaaaaaacccaacctatataatttaggatgggacataatttagcacaacgaatctggtcagactcctgtccagtttcgttgtactatattatgtctcattctatattagattgggcttttttgaacggagggagtacacgtgatggtgatgtgacttaacctaaagcttgcttcatgagagtcagtgcgatagtggattttaaactagagacttcttctcattgcttgtgtgtcacttaaatagttataatttttttagaagatgtattaacatgtgatatatcactacacagacatgtaacttaaaatttaatttatgtttaaattgttttttttacatgtagaagttgaattttgagttgcatatttgtacaacaatatatcatatattaattcatcttctcaattttttttaattttttgtacaactatttgatatgcaaacaatgagaggatatctgatcgagagtttaaaatagtttcgccatttaatacttgtagtgggaaccaatataagaagaatggattaggtactacctccataccaaaataagcttagttttgaaccatcctatgtataccaataccaacaaaaaaagataaaattagtcctgctctatcaaatttcaatacaattatttttctcttcatctacttttaatgtatttatgcattacttttacaaactctgaacgaacaatcactcaaaaaataaacttgtttttgaataaatatgagaagcaaaaaaataaacttactagagagaacttcactaagatacggtttgcagcacatgcatcggtctcatctttattttttttcttatgcttatgtttatcagctaaaatttgaatttttaaccttatatttggagtagattttaggattttttttaatcgaagtttattttttcagtcttttcttttagatcacaagaacacatatataaaagttttatttataaattatttttcgtttacaaatatgtcatttcgcgaaacaatatatgggatcacatcatgattcctcgattgaaagcaaggatcgttcttgaatttttttactgaggacattgaatctgtcggagtatgacatcaagtgagtgacgtacgaacagtgtgacactgtgacagtggtacaagccctttgcacggttggcacatctgtttgaatcattgaatggccccaagacaatctagaagcggactatagcaccacatgaccgaccggcagctttggtcttctacgcttccatatactgcgacgcaagctcaatttattagcaattcgaatacaactttagctatcaaatttggtatattcatagaaaacctgccatagtttgatatcatcaaaatctgataccaatggattggtgtttggtactttttgatcctaggggtagataatgtcaatgatcccaaaagtttgtggctgtaaaatcaaagttggtttcttgactccaaaatgaatcaaggattgtaaaatatcttagggctgtgttcgttaattgtggttaggagcaaacggagcaatccattaacatataattaattaagtattagctaatttttttaaaaaaatagatcaatttgattttttgaacaacttttgtataaacttttttttgcaaaaaacataccgtttagcagtttgaaaagcgtgcgcgtggaaaaagcctaggtccggttctttttctcaaccctaaacttcaactttcttgttattcattagcacgttttttaaactgttaaatagtatatgtcaccagcaaaatgtttctatgtagaagttatcaaaaattcaaataaattattttttaaattttatactccctccatattttaatgtatgacgccgttgacttttcgaccaacgtttgaccattcgttttattcaaaattttggtgcaaatatgaaaatatttatgtcatgcttaaagaacattggatgatgaatcaagtcacaataaaataaatgataattacacaatttttttttgaataagacgaatggtcaaacgttggacaaaaaatcaacgacgtcatacattaaaatatggatattaaaatatgaaggcagtaatagttaatacttaattaatctaataaattttcttgttttgcgtgcgctggaaataccccctagctaattagagagaacagacggggcctattaatactagcaaggtcagtaagaaaaccttggatatatatgttcgatttgtattttgtttgtatattcagatggttatagctgaacaatggcggctctaagagcatgtttgttgtttggttcatagccattccttactttgccaatgacaagattaggccattattgcctttttttttaaaaaaaaagggggggggggggggctaggtattcacttgctttgctaccaaagttgcatttggcattcaactaagtgaaataatttggcaatgacacattaattttttgctacaaacaaaacacataactaatttttttggcattgtggaaattttggctttggttaacaaaccaaacataccgttgtctctagaagagcttgctagccgcacaagggcctgtagtagcacgcagtttagcatgacgggtaactgggccagtagagggacgcgttgtgcacatgcatcttggtgcaaagtcaccgtggcccgtgagtaagcaggccatgtgaaaccgtctggaggagtgcaggtgcaacagaaacacacaagctgacatggatagagtttgattcgcatcccgcaaaagacagaaccagatataataagggtccttcaattattaaaaccgagttcgacgcctccgcttggcgcagttcgtccgcctccttttttttttttaaacacaaacaactttattaagcaagtacagatattaggggataaaccctagcacacagcataggatagaaactgtaagcataatagacaaccctgaagaaagagggttaaccgagctacggaagcctttcagatgtgaccaaacagcagaaaaaaaagtcgacagagagctgcggtgctgccgtgacgactaacagagccacgatgtcttaaaaccgcgacgactgctaccttgggcctcagttgaagtgcacaccgcttgacaaaccgttgatccccttcggttgcctccacggaaatggcacaagatcgaggttcgttgctgagccgtagattttggtgtgagcattatctcactcagcgaagcatctccacgggattcgtcattgaatctgaggaactctaacaacaaccctgacaatcaaaattgggcaggggtccgagctcaacctgaatgacaaaccatgcgcggtttctgcttctagaaaaacaaaagagagggccaaaacgtagaccagccaaccatcaacaaagaagcttttgagaggctgccaattgacttatgtcttgctatgagggcggggatggctaagaaaagggcaacctgcaatgtggaaccacaagactctgggcagaacaaacacccattcacaagaatcctaaaggcgtcggcttggaggagaatattgacgacgagccgaccgctgccgccaacagaggaagaatctgcaccagggatagcaccggctagcgtactgcaggtgacgagagtacgggaagtgacaaccgccacaccgtcgagcgcaacacacacgccgacgcctgccgacgccaccaccagcgcaagcgcgacggagggagacgacaaccaaagtgacgccaaccacaacgttcccatcgacagcaccgccaacacaggcgcggcgaagggagacgacggctgccgtagcaccgagcacggcgaagagtccatcgccacctcgatgacggtcgccgaaacgccaagcacggcgccgacatcgtcgccacctccaacgcggatccgcttgccagcagggcattggtgttgatgcgaaaaaaacacactgacctggaagatctgcttaacttcagtgcaggtccaaaatcttgcttttaggtttgtgagcgtgccagttgatttgatcctgcaatcagcaagaaacaaagacaagaaaaaacacggataaatccataaacgatatacgatcggctagttgccgatgacatatcatttatctttgagccgatgtcatattggaatcaatcggaagttataaataagcaaaatagaactaaatctactcgatcggctgtagatatcaatgatatataatctttctgtcgatgtatatttaaaccaagtgattgggatagattggtcgccatgccgagatagtataaatcacttagatagatgtatacattaacacaaagattatagatgtttatagcatagccgatcagatagatctagcatatatcggctaatactccgatactactctatattaagatattaaaacaggtataatatatcaatcaaaagcttagtatactttattgcaataagatcttaacataaagggcagatttagcatattaattaagcatatatgatgtaaagctaaatcaggtaagatcggctgaaaccccgatactatctctctcggtgatcataaagcaagccagatatcatagttatagatattatttaataggtcgaactcaaccgatgcagcattaagcataaagacaagtataagatctagacaagatgatgaaaacctctaagagatggtagatacacgatacaatctagattaataatagaacataactctatcgattgcctcctaacaataagaaccagccgataacaagttatatatcacgactaacaaagattgcaaaatgtatatgataactcgatgaattacataaacaggattaaagtgtcataaagatggaagcattaaccccgagaacgcaagccgccataacaagttttacctctagttgaagatcgaatcgatgcatctcaacctgaaagcagaactcgtcgaaaaagaacaaaagtaaaaagggtggcgatgcgccgagattttattgaactgttgttaattgtttacatgtggttcgggctctatttataccagagatacaaaatatgtccttgccggacacgacacttatctctaacaaactctaagataccataagtctttgcggcaaacttttgcccaaacatatctctaaggaaattatacaaaatatcctaattaatagatacaattgcctatctgagagctttatctccattatggcaatcctcatgacgcacatcaactgattctagaagcatctctgcaaccgtcatcaccggaatcggctgcatcacctctatcggctgtcctctgttcgatccatctcaggcgatgcatactccagcagatgctgtcacaccctgatttttgtttcaggatttataaattatttaataaattattattagaatttatattaaatgttcattaatttacaagtgaagttaaatgtgggaaataaaatttcctaaatttaaagcatggatggatttcatttttattaaattctccatggttacttatactctctggaatattctcggatttttcggagctcaattcctaatttttaatcttacaaagagcatttcagtaattacccacatattaaattaatcattaaatggtctaattataattttgttaagtactttgagtgtccaagtattttcaagatttttcttggaattatttgagcataggaagtatttttaacaattcaaagatcatttcagtgattaatttaattggaaaagtatttaaaatccccttctccttttcgggccgaaataggaaaagttcagcttctgtcctcggcccattctcccttcctttcggctggccttatccctcctccaaagtctgctttgtgtccctttttcaatcgggccaagaagtagaagcccagccaaaagtctagtttgcctccctgctacagtgtcttcttcaatctccagccggctggagacagagcccgagccagccgcacagtacctgtatagccgcggttttcccctccaaatccggccttttatctcgtgtatttccaaaattagttgaggggaaatactcctcttatcctcctctatctttacccccaagaatcggagtattttatccgaatcgaactcgtttttgagtttatctccaaaaccgagtttttgatttcccggatcgatttcttgcgggaggagtccgatctcttcaatccaaggctataaataggaccccctagtcctcctctttcgtttgccccctctcccgtcctcttccgtgctccgtagctccgtcgccaccgccgccaagcaaaccgccgccgccggccatctccggtgccgccgcgccgccgtctccatcgtcgtcgccggtcgccgtcaccaccgttgggtgcgccgtggtgaggggaagctcggccacccttccttttccgtcgccggtcaccggagcccctccgccgccggtcaaccgagccgccgccgtcgcccctctcgtcgccggccgtcgtcggtcgtcgttcggcacttcggtgagcaccatcgggttcgtctcgtcgttctctacgtgtaggtgtcctccaaatccgcagccggtcgccctagctccggcgaggtcgccatccgagccggccgcctttgatgaggtcatcatgacgtcatcatcgtttttctttttcctgtttttctaatagattaaatcttcggaaattcataactaaatcatcgtaactcggttttgagtggttcaagttgctaaattcatctaaaatcatgatctacatgtttgtttactttatatgtactgtttatttggtttttattagtctttttcttcgttttgcgtgttagcttgtcgtttccgtcgttgcgaaggttcgtgagtgcgtcaggagtgttcagaagattaattgaagaccgattattgcaaggcaagtcacacagatcctaaacacaatcctttgagcatgttgatcctatatttaaattctctatttatttcaactgtgcatttattttcgaatgtcaccgggtggtgtgaacttattcctttgttatggccaatttgcattgattactttattccttgataccttgggttattataacttgactagttgggctttatatattggttcagctagatattagttatgattgcttagccatgcttagaaacattagcacactattgggataacttatgactcactattagttaaggatggcttaatgatagttcacgatggttaatcgtgattggttaattaattacttgccaacaaaaacttgataaggtgggttgtgagcatatggttttgagagtcgtgctcatgacaattaaggaccggttcgcgagctactgttgtaaaacatttatcgtgccaaccacaagccagcgtgggcaacggctttatcttttgtgtagcgtgattcattatagtgcgccagactgagaagtggcgagaagtccacgagggtcgctggggagtccatgccttgtttataagggggtgattatgatccaggaaaggtgcgctgtaatgggttatgctgtgcaaggggtattgtcacaactcctttccgaggtaccgtggtggtattgaggcacatggtgacatgatgtggggttgtgtcttgtgggtacagtggtacacctctggccagagtaaaactattcgaatagccgtgcccgcggttatgggcgggttgagcaatgtttttcgtgattagtctcacacctctcacaataattatggatgttataactggtaacaatttgcttagctcctggtttggagttagatctgtacagccgggtatggttgttcaggatggttgggcctgtgcagcatgggtgtgctgttcagtgttgattaaaatttttaattaattactctactgttttactactcttaactctttgctaaatgctgctttcgcaaatgagcctatattatgccatcctttggtatccttgtgcacttgcatatttgctgtgtggcttgttgagtatgtcatatgctcattcttgcaataatcaatcaaacctcagttgaagataaaggatccagaaggagaagacgtttggcttataccccagttgagctgcctgtgggagtagagctgaagccatcgctagaccgttaattccgctgctgttttcttttcttttgtaagtgtgtaacgttattattatgatggatttgtatattaaattgtcagtttgtgtacctcggctgattcctggacgaggattttatgcacaaataagttcggaaattactagtgaatttccgggcgtgacagatgccttcgcagccgatgcatactttgttcttcgaatccaactcttagctaaatccgcctcgattccaatgtcgaaccttgttcatatcttaccaaatttggttgtcaacaactagccaccgccgtcatgagctcctccaccaccaccaccaaggccaaccagatctaaaattttcacctcacttcgtgtggacccccgtttttataataggaatcaatcgtgtaaatagtactatttccctggatcaagtagtctggtacacacgagttcatagctgaaataccaaatgctcatacacgagagtctggtgcgaattattatatcataagcccgcaggcatagtcttagatcatcggaccgagcggtccggaatacattccaaaagcagaagtagataaggcagcggagttaaggcagcggcacgccattgtcacaggcaacgaccgtaactaagacctactgagcgccgtcgtcttcatcaccgtcctagtagtacgcgtagggatcctccgaaacttcatctccggcctctgattaagtttgtatattgcaagggtgagtaccaaccgtactcaacaagccaccacagcaataatgcacatgataggggtattcaaggaatggctatggttcttttgcgcaaagcaagttttgtaattccatttacaagcctaaaacctagcatagactatccaaattttagtaccagtgttcatatttaaacaatgacggttctgtccaccatccattgtgatcccaagactagcttcccgccattgagtcatcatggttttctgaggacgtccatcttcccttctctcgaaaagtggctccaacagcataaaatcatcatgcaataacctatcccacacaaattaagaatttagagtctagccaagtgtaatacacgtctcggtgctcaataaccgcgagcacggctattcgaatagatttgatttactcacactgcagtggatgtacactttacccgcactccgtgactgcccaacacatgagccacgtcccaacacatgagacacgtcacgacaaagcttttcgataagctcgcattggcagtacccgctccatgaactttacatcctcatgcactctaggcgtacacggtttctagcagtgagagaagttctggcgcacctgggaaggaaagactcacacatgcattaagttataattatgttttagattctcacatggcagtcctaccgatggcgacaccactgtagacacccgcttcgcggtcctaccaatggctgccccaccgtagagcccctgcctcacacatcaagaaaccactatgcatagatactgcctccgctcagctatctactccactaggtctatacccatacgagaagtgcggttgtacgggggtcgtttcatgcttaacttcatggttcggtccttaattgaccggggacggtactagccttttccggataccacccaaatcctccgtccgccccggtcgaaaacagttgtttcattttattttcctttcacaaatcatgtcatcaatatcatggcaatgtggcgctcatgtctccacatgccgcatctcaattaccttcccaaaggtaattgcccaagcatatagcatttgataaatatgagtatgcatgattctagaatagcatttctaagcaattgtcataattgactagggactcatacgtaaatatggttacgaaggcataagggtaaacaataatcaaggcatggcatggcatattcaatcttatttgtaaataaaataatttcgcaattgggatcaacatgttcaaggaatagtgatgacttgccttgctcgaagtcctgcgggtcttgaccctcgctcggatccgcaactccctcgggctctagaattacgtgcgaacaaatggtttgaattcaattagaattcaataaaatccaaataaactccaatagaagtcgaacgcgaatcgatcttcctatatcaactacaaggtttgcgaaaccacgttattcaatttttagggtcactcgacccaagtcactttgtgatttagaagtacattcctaagaactcaacataattatttagctcttaataaatctaaactcccaccgcgaattgattacttatagagattacgaaaaataatctataatcatattaaactttgcaattctacgactacaattaatctataattaatttctaattattctaaattttctaaacctcactaatctccctctaatttctatttttttcctttttctatttctctcctcttttctttcttttcttttttctctcttttctttcttttctttttctctcttttctctcttttcttttctctcttttctctcttttctttttctctccccccggcttcttccttcctctctctctcggctcatgctacccgaggcggcgatggcggcggaacggggaagggcggcggcttaccgacggcggcgcaaggcgaggcgacgctcggcgcggcatacgacgcggcgcggcggcaccgagggcggcggcgcggtggagaggaaagaggggaggaagagggaaatagagcgggggagaatggagaggggtggggtttttataggggagagggggaaagaaagagaggggagaggtgacggggacgagcgatgcgatggcgacgcgcgcagcgcggcagcggcacgggacgcaaggcggcgaagggacgatcgcgcggcgacaggacgggcgacgcgacggcgtcaggacgggcgacgcgacggcgacaacggagcagggctcgaggcgacggcaacgcgcgcggcgcggcagcggcgatggcgatgcggcgcggcagcggcgcggggcgcgaggcggcgacggtgacagcgacgacggcgatagcgacggcgaaggcgcgcggcggcacggggctcgagacggcgacggtgcggcagcggcggcacgggtctcgaagcggcgacgggacgcgatcgaacatctagcgggcaatgaatagtgacctctcctatttatccctattttagcttgttctctatataaattttattctataaatcctaatttttgcacaaatgaagtttacccaatatttgtgttatttcaaccaatggattcactctagattaattttacccatattttatttttatatataattttcttgaatttaattagagttaattcttattccatagcacttaaatttaattcatacaaacatggtcgcgataatatttcattcatttctatcctcaccaaatctgtattttaaattatattttaattgtttattttgcccatttaattttagggtttattcctaatgatttattcctgtttgcaacctatgaactccgaagtcaaaatccaatgaaataggcgaataaaattggcatgatgcaatttattttaaaagtttttgaagacccataattttagagttttgattttgttggtcggattttcagggtgttacaaacctacccccttaaataaatctcgtcccaagatttcttaccggttttcgaatagatgcgggtattccatcttcaagaattcttcgctttcccaagtggcttcatcctcagtgtgattactccattgtaccttgtacatacgccacactttggtcctagtcctcttttcagcttcgtccaatatccggactgggtgttctggatacgtgatatcattgctgatatgaatttcttccaacggagcttgttcctccggcactcataagcacttctttaattgagacacatggaagactgggtgcacatcggcgatattttctggtagctgtgattgatatgcgacttctcctcgtctagccataatttgaaaaggtcccacatatcttggcgctagtttcccttttaccttaaacctttttgtgcttctcatcggagaaaccttcagataaacataatctccttccttaaattccaggtttctttttcgggtgtcagcgtaactcttttgtcgtgattgtgccacttttagacggtcacggataaggcaaaccttttcttctgcctccttgataatgtcaggtccaaataccgcccgttctccagtctcggaccacattagtggggtacgacatcgtcgaccaaataatgcctcattgggcgacatcttcaggctagcttggaaactgttgctgtaggagaatttggcatagggcaaacatctctcccaatccttgctgaaatccaaagcacaagctctcaacatgtcctccaagacttggtttgttctctctgtctggccatctgtttgtgggtgataagctgtgctaaaagctaggtaacttcctagggcttcatgtactttttcccagaaatatgaggtaaactgtgtgcctcgatcggatataattctcttaggcacaccatgaagacatactatcctggtcatgtataactcagcgagcttggcaccgctataatttgtcttgacaggaatgaatcttgctgtcttggtgagtcgatccataatcacccaaatggaatcataccctgttgcggtcctaggcaatccaacaataaaatccatacctatctcatcccatttccattcgggaatcctaaggggttgcagcaaacctgccagtctctggagctcagccttcaccttctggcatacgtcacagagcgctacgtattctgccacatctctcttcatgttgggccactagtatccttccttcagatcctggtacattttcgtacttccgaggtgcaatgaatatgccgatttgtgagcttcctttaggattaatcctctcagtccaccccgttcgggtacatagatcctctttttataccataagacgtctttctcatcggtcgaaaattcctttgcaaaccctacagctagacgtcccttcacctcttggatttcttcgttgtccttctaggcttcttctatttgggttctcaaaagaggttgaatatccagggtgtttatctgtccacataatactatatgtaggttcagctgggctatttcctccttaagttcaggagccatcccttccattctcagatgattgcaatggctcttacgactcaaagcgtcggccacaatgtttgctttgcctgggtgatagtgaacctcgagatcatagtccttgattaattccaaccatcgcctttgcctcaagttgagatctgactgggtgaaaatatacttcagactcttgtggtcagtgtagatatcgcaatagtttccaatcaaaaagtgtctccaaatctttagcgcatgaaccacggctgctagttctaggtcatgggtagggtaattttcctcgtgtggtcgcagttgtcgcgatgcataggccacaacctttccgtcctgcatcagtactcctcctagtccctgccttgatgcatcacagtatatcgtaaagtctttcctattgtcggggaggactagaataggcgcagaggtcaacttttctttcctggcactgttctgaccacacaaacttcttttccttcttgagcagttgagtcatcggtcgggctatcttagagaatccctcaataaaccttcggtagtatccggccaaacctagaatactccaaatctcagtcacagatttgggtgccttccattccataacagcctcaactttagcaggatccactgctactccaccggctgagattacgtggcctagaaaagtgacttcttttaaccagaactcacatttactaaactttgcataaaatttatgcttccaaagtttctcgagtaccaatcgcaagtgctccgcatgctcttcctcgtctttggagtagattaagatatcatcgatgaatactaccacaaatttgtccaagtaatccatgaacaatttgttcataagattcataaagtatgccggggcgttggttaacccaaacgacattactgtgaactcatacaatccatagcgtgttgagaacgcagtcttgggtatatccccggtcctaattttcaattggtggtaccctgatcgaaggtcaatcttagagaacaccttagctcctttaagttgatcgaaaagatcatcaatccatggtagtggatacttgttcttgatagttacttcgttcagtgagcggtagtccacacacattctcatgctaccatccttcttcttgacaaacaacactggggctccccaaggtgacgaactggggcgtacaaatcccttctcttgcaactctctgatttgctttttaagttcctccaactcattgactggcatcagatatggtctcttggatatgggggcagttccgggtatcaggtcaataatgaactttatgtcacgatctggtggcattccaggtaaatcttctggaaacacatcggggaatcgctgcactacaggcattcctttcatgggtagcatggtaaatatgcctccggcacgtttggccagtctaggatcttgattcatagttgctctcatatccgattcccagggtgtggtcagggtaacttctctacgtctacagtcgattactcctctgttctttgttaaccaatccatacccaatatgacatccagggtctgaggtatcaaaaccataaggttggagggaaacaccacatccctaaggcgaataggtatgttgatgcaagcatgacttacggttatctcgcccccaggtgagtgtactatcataggctttctaagtcctactagggttaagttgtgcttttgactagcctccagggatacgaatgaatgcgatgcaccagaatcgaagagaactttaaccggggtagaattgatagagaacatacccattagtacgccctgatcttcctgggcctctttagctcggacatggttcacttgtccgcgtccaaatccggtagcgagcctgttagtctacggagtcttgaataaactgcgtccggcagcaggggtagcagtcccacgaacagtcattgcattagcgcccgtacagacaggagttttgcgtgtatgtgggcagttgttggcatagtgcccatactccccgcagttgaagcagtccacattcttcttgactccaggggcagccagggttggcgtaggggtgcggttttgaatcgcaactggcctattgaaattgctaggcgcagcgggacggttggttgccacaatagtgggcttccatccagacgaagtggctcccttgagtcgctgaggcactccctgaggtgggcgattcatagcaagcctcctcttgcggttgtgctctacagtcctttgatcattctccagcctaacgactttgttgatcaggctctagaaactctcatgatcttgtccattcataggcccacgcaactcatcattcagcccttggatgaacttgtcgatcttctcctcttcatctacgaggtctccgattgtgtaacgggccaactgagtgaaccggttcagatcttcttgcaccgttgtgtttccttgtcgcagccttctgaactcgttcttcttcatgcgcatcactgcagcaggcacgaagttctcacggaaagctgcagtgaattcttcccaagtgggttctccagcttcttcttcccgagcttccttgtaagtatcccaccaatcgccagctggtccctctagttggtttacggcgaagatcactttgttggcttcgcacacccggacaagggtcagtttcttctctatgatgcgtagccaatcttctgcctccataggctcgtctgccgtagcgaaagtgggtggcttagtcctcataaactctccgaagctcgaccctccacggttgccttgattgtttgcaatggcttgcagaagttgggtttgagtggccataactccggccagggtggttaggtcgggtgcttgagtttcttcattgctggttgatgcccgacgtcggcttgccatctgtgtaggccaattaggtaagtaacctaattttctaactagcccttatggttttatcccgttaagggagttgttttgatgtgaactttgttttgtaagcatggtggaataaactcattcataatacaacgataataatatcataaagaacatcacagagttccacagataatacataaggcatgatacaatcgactgcacatatacgcagtccaaattaagttcatctaaaagatacatcgaattaatcatcaagctactcgtcaatctagatagggggtgtgtgtgtctcgcatgctatccaaaaaccatctgaagcgagatcgaagctgcaacagtcctccggtctaatcatccaaccatccgcaggatcctggggcaggaagagggtggtcgctggctcgtgcgaacctgagtccccacggctcggaagtagtggctctggctctggcttgggcttcttgcccgggggttgtgtgctcttgcgggcagtgctgagggtgcgaggtcctccgataaaggtgatgcattggacaggagtctcgtcctttgaaggatcagtgatgtcctgctctatctctggctcagtgtcggtcccctctgtctcggagtcgatctggatcggagtcaacaaactggaacccagctgcggtgacggagtaggggtcagtggagtgtgcacaatctccgggacaggtggctgtgtcactgtcgggtccaccaggtaaggtgctgactcggtagctagcatatcaacctctcccaaaagagtgtggaacgctggtgggtacggcggagtaaggaagaagtagcggttacgccctactgctatggaagtagaagctcctgtggtgctgactgtagctgctcgaagctgctccttaagctggctgacgtgctcctgactctctctcagctgctcctcgagtgtatccatcatctcgcggcgatcattgtactgatcagatagctgctggaactggtcgccgtggacctggagctgtgccttcagtgagtctatctcactgccccaagcctggtgctcctcctctagctgaagctgctgcattgcgaggtcagtcaccttagtctccaactctcccaaacgcctctgctggtcgtcgatctctaatagggcctcctcgtagaagtcgtctactgcctcagcccatcgggacagtcgagtcaccatcgggttgtagcagcaaggtgtctcctagactttgcagatagagttgccctcctcccgaaacgggtggtgagcaaactcggtactcgccaactcagctcggtgaatagagctaagtcggaggaaggcctcccgggctgcgtcctgcatcgcggtctcaggtgaatcgtgatggtggcgtgtcgaaaagctgtagtctgcctctgaaggaactcgtggcctcatgtcagcttgtgcctcccatccaaatccacactgcctcactcggtaagtagggaacctcgagtatctcaaacacctcatcatacgctgcaactccaaggtgtatccctctgcacggggtactcccgtctcccaggtagtgtgtgaatcctgatctgccatctaattttaagaaaacccaaagtcagctaaaagtaaaactcattttgtgaaggaaatagttgagagtaagatgaaaaatcgtatagagttttgtaaacatagtgtttttattttcgaaagtattgctaaatgggaatttctcccttggccaactagaaagggggtggggcgccatttggtcttttcctacagtcgtatggctctgataccagctctgtggacccccgtttttataacagaaatcaatcgtttaaacaataccatttccctagatcaagtagtctggtacacacgagttcatagctgaaataccaaatgctcatacacgagagtctggtgcgaattattacatcataagcccgcaggcatagtcttagatcatcggaccgagtggtccggaatacattccaaaagaagaagtagataaggcagcggagttaaggcagcggcacgccattgtcacaggcaacgaccgtaactaagacctactgagcgccgtcgtcttcatcaccgtcctggtagtacgcatagggatcctccgaaacttcatctccggcctctgattaagtttgtatattgcaagggtgagtaccaaccatactcagcaagccaccacagcaataatgcacatgataggggtattcaaggaatggctatggttcttttgcgcaaagcaagttttgtaattcctttcacaagcctaagacctagcatagactgtccaaattttagtaccagtgttcatatttaaacaatgacggttctgtccaccatccattgtgatcccaaggatagcttcccgccattgagtcatcatggttttctgaggacgtccatcttcccttctctcggaaagtggctccaacagcataaaatcatcatgcaataacccatcccacacaaattaagaatttagagtctagccaagtgtaatacacgtcccggtgctcaataaccgcgagcacggctattcgaatagatttggtttactcacactgcagtggatgtacactttacccgcactccgtgactgcccaacacatgagccacgtcccaacacatgagacgcgtcacgacaaagcttttcgataagctcgcattggcagtacccgctccatgaactttacatcctcatgcactctaggcgtacacggtttctagcagtgagaggagttctggcgcacctgggaaggaaagactcacacatgcattaagttataattatgttttagattctcacatggcagtcctaccgatggcgacaccactgtagacacccgcctcgcggtcctaccaatggctgccccaccgtagagcccctgcctcacacatcaagaaaccactatgcatagatactgcctccgctcagctatctactccactaggtctatacccatacgagaagtgcggttgtacgggggtcgtttcatgcttaacttcatggttcggtccttaattgaccggggacggtactagccttttccggataccacccaaatcctccgtccgccccggtcgaaaacagttgtttcattttattttcctttcacaaatcatgtcatcaatatcatggcaatgtggcgctcatgtctccacatgccgcatctcaattaccttcccaaaggtaattgcccaagcatatagcatttgataaatatgagtatgcatgattctagaatagcatttctaagcaattgtcataattgactagggactcatacgtaaatatggttacgaaggcataagggtaaacaataatcaaggcatggcatggcatattcaatcttatttgtaaataaaataatttcgcaattgggatcaacatgttcaaggaatagtgatgacttgccttgctcgaagtcctgcgggtcttgaccctcgctcggatccgcaactccctcgggctctagaattacgtgcgaacaaatggtttgaattcaattagaattcaataaaatccaaataaactccaatagaagtcgaacgcgaatcgatcttcctatatcaactacaaggtttgcgaaaccacgttattcaatttttagggtcactcgacccaagtcactttgtgatttagaagtacattcctaagaactcaacataattatttagctcttaataaatctaaactcccaccgcgaattgattacttatagagattacgaaaaataatctataatcatattaaactttgcaattctatgactacaattaatctataattaatttctaattattctaaattttctaaacctcattaatctccctctaatttctatttttttcctttttctatttctctcctcttttctttcttttcttttttctctcttttctttcttttctttttctctcttttctctcttttctttttctctcttttcaatcttttctttttctctccccccggcttcttccttcctctctctctcttggctcatgctacccggggcggcgacggtggcggaacggggaagggcggcggcttaccgacggcggcagcagcgacggcggcgcaaggcgaggcgacgctcggcgcggcacggcggcaccgagggcggtggcgcggcggcacgaaggcggcggcgtggtggcacgagagcggcagcgcggtggagaggaaagaggggaggaagaggtaaatggagtgggggagaatggagaggggtggggttagaatggagaggggtggggtttttatagaggagagggggaaagaaagagaggggagaggtgaccggcttaatggtgacgcgacggcgatggtggagcggggcttgaggcgacggcgacgcgcgcggcgtggcaacggcgatggcgacgcggcgcggcagcggcgcggggcgcgaggctgcgaggggacgggcgcgcggtgacggaacgggcgacgcgacggcgtcgggacgggcgacgcgacggcgacgggcgacgagacggtgacggcagagcggggctcgaggcgatgacgacgcgcgcggcgcggcagcggcgatggtgacgcggcgcagcagcggcgcggggtgcgaggcggcgacggtgacagcgacgacggctacagctacggcgacggcgcgcggcggcacggggctcgagacggcgatggcgacggtgcggcagcggtggcacgggtctcgaagcggcgacgggacgcgatcgaacacctagcgggcaatgaatagttacccaatatttatccctattttagcttgttctttatataaattttattctataaatcctaatttttgcacaaatgaagtttacccaatatttgtgttatttcaaccaatggattcactctagattaattttacccatattttatttttatatataatttttcttgaatttaattagagttaattcttattccatagcacttaaatttaattgatacaaacttggccgcgataatattttattcatttctatcctcaccaaatctgtattttaaattatattttaattgtttatttttcccatttaattttagggtttattcctaatgaattattcctgtttgcgacctatgaactccgaaatcaaaatccaatgaaataggcgaataaaatcggtatgatgcaatttattttaaaagtttttgaagacccataattttagagttttgattttgttggtcggattttcagggtgttacacttcgggacccttgcttgaggatgattcgacctccatagcttcgattcgccatcaaagaagcacaaagccaccagctcccatcaccgctgccgacgaggaccagaacaccggacaccaacatgggaggcaacaccagccaaaccctaggacaccagactaactagagaaacaggacaaacctgactaagaactactaggggaaggtggccggacccctcgtccaaccctcgccgacggcgaaccaccagaatcgaaggggaagaggggccggaggggagaaaatttggggaggttactgtagaggaggaggggaacgaagggggtcagctcaacagagagttataacccgagagaaatagttcgtccgcctcctcgtctccgtgtatgtgctcatcgggttcatatggggaggtggcctataagagcaagtttaaaagtatagccaattacttgctccaaatcgtctatagtcaatttaatagccaattttccccacaaaaataaatttaatagccaattcattcattatctaaaaaagctaatttatacaatagttacatataaacataaactacagaattaatacctggtcccacctgtcatgcacacatattttgtagtctgtgctacagctggctataaatctatagtccgcttcttttctctcttctcttttatctcctcgaaataaatgtgtttatagctggcttatagtctgctattgtacctgctttaacttgtcgatgagctagtattgtacctgctttaacttgtcgatgagctagtagagacgaggggatggaagaaagccctcagtaacatgggtcccatggttatttttaattttttttaagtaaaacaaccatgtaatgtaagctccacgtcattatgggtagacaaagttaacacgccacatcagacaaaaccgttgtacaaaccagcaaaggagatgatttgatatgggttttgaagtaaggtggcttcctacgtggttttgcggcagaaggatgaaaattaaactcggtctatagttgagggaggaggtgacattgactttttcaaaaaatcttaaaacggttcagctatccatcggcatgcggccgtaggccgtgtcacgagatggcctggcccaggtgcttttgccgatcgagctgctagctagtagctatcccgctaaggcgcctcatataggtaaggaataagtctaaaccgaatattttgtccgctaaggaatattttgtcttggtaaactattgtctttgatcgaatcacatctcttaaccacaaaaccgggtatgtttcatcctccaacttcaaaatccgataccaatcaacttctttgatggtttgttaaggggtttttggtaacgtagcaggtttactcattaagtaagcgtagactactacaaatccacatgttagagtaagttcaatagtatagccaactactagatctaatttatctatagccaatctaatagcccattcatacaatagttacatactacactattaatatctggtcccacctgtcatacacactgtgtcttagagtccgtgctacagctggctacaaatctgtagcccgctacacttctctctccttatttattttcttaaaatatatttgtagctggcttatagcctgctattgtacctgctcttagtacccattcttctctacccttttctatattttttctctctattttttttcaaccaaaccggcagtgcaggggtggctggctggctggcgagcccctccgagcatgtttgcccgtccatcgtccccgtagctccgagaggccgccgcgcgcacggtaggtcgactgattagggacggagaggcacttgcacttgttcattgtcaaaagaggccataggcacggatggcgtgcccatcgatgttcatgtgaggttgtggctcagacaccgtacgtccgccctgacccctgacaccatcatgggagggagcaaggatcttgaagagacctcagttgcagatcatggcgcggccaccaatcacgaggttgtgggcttgggtgccgccctccgcgacgccatcttgggagagggcaaggagcttgacgaggtcacgagtgcgggacgacacagccaacgacgttcatgagggctctgagtcaaggtcaccgctgcctgctgctcactagacctcggccatctcatcgcctgccaagagaaacaaggaaataagagggagagctgaggtggagctgttttttttttcccttttgcatgtgacttatgtgagccccatggtttttctatttttgttttctgggtagaattaccacgcaagcaccacatcaacatgtatgaattaagtcacacaaaaccacttaggaagtcaatttattgcaccggttttgatagtttgggatgttctatacccggtttttatagttaaagggtgtgaagcaatctcggcctatagttgacagagacaaaatagatttattcccatcgacaacacagcccaccgtatcccatcgaccgagcccagccacaccagccagcgcacgcagcacatgcatcatcgacccatagggatggcaacggggcggggcggggccgggttgggctggaacgccccgcacccgacccccgacttcacccccgcccccagccccgaccactcatgcgagtcaaaaacagaacctgcccccgaccccttggggccccgcaacccgaccgaggccccgtattgggtaacatctccatccaatcagcgcaaaaatacaacacaatcattcacaaatcacaaatcacaatatagaggcagcagtaacgggcaccgtttcattcacaaatcacaaatacatctcagtctctgtgaattgccgcctgtgcgtaggtgaagctcgtcgtgaatcgctggccaccgtcacgcctgtcccctcgccgaccgctgcaaccttgctgcacccttgcctgtctcgccggccgccgcactctgtgcgccgccgccgccccttgctgactccagagggagaggtggagccgtggaggggacgagactcgtgatgccggcgccggacgccggaggggagattagagaggatgggaggggagagggtggccgacgaggcggcgacgccctgcaccgccacctgtttgtctcactcatgggaggcggcgacgccctgcaccgccacctgtttgtctcactcatgggagggaggggatatggggagagactgagagataaggccgagctaaggtttagtttttattatatatctcaattttttttggtgggttaggctttttggccttctataggctatattttgagggtttatatacacccccacgccccgcgggtcacccacgggtgaaatatgtcccccgtcctctccccgcctaaatgcggggccccatccccgacgcccccgtgggtcgaaaatcacacccgtccccgctcctgtaggggcgggtccccgcgggggaaattgctatccctatcgatccggcgccccgcagccagcaggcggaacgacactaactgagtggggaatctcaatggcgtaattgaccccgtgatttccgcggatggtgcagctgctgccacggaagagcaggagggtaaacaaacctccataatgataacttttgcttgcgttttactacaccattttttatgacctgttaactctttcataaaaggtttgataacattttttatttaaaaatttagtataaatatgtaaaagtataaaccaaaagttttcaaagaaatattaaatttttatttaatgacaaaacaagtcaaaaacaaaagaaatggcatatttcaaatcggtggtttcgccatatgatcgcgggacacacagccacacacttctatctctacccgttggatgaattgatccatggctgagaaaagagagggaaatttcaaatttcagtgtacgtttttctaggtgcacttaagaaagaagtgaactgttgctttttatattagtatagataatctcttctggaataaatcacacatacggttgctaaacttatgtaaatgtatcatctactaggtttctaaactttcacaatatatttttttatcttcgaatttatcttgtatgtcataaaggtccaaacaggctccaacctattcagtacgctaacatggcatgacatggtggcacatacatgttggtgtcgcatcaacgcgtatggagtgggttggagcccgtttagtcctatatgatacccaagataaattcaaaaacccgaaatgtattttaagagtttagaaacttatatatgacacacccacaagttcacacaagtttagaaaattgtcagtgcacttcactcattattttgggtgccgacacgtatggcgcccatacataaatacatatatatatatatatacacacacacacaccagctatattagttttttttttccaattacatggcaacacactgctatgcacacaataacacactcacattcccacgaatgtgcccccactctctaacgcatgtttaaaaagataaaacccaacatacatttttgatcttactaaaatacagtcgaaaactcacgtgcatgcgcctaatataattttaacacaagatttgagatcgacaacttaaccatgtacggctataccagctatatattagttttgatacttaatggaatgggtaaagtccaattttggctcgtaaccttttgttagagttcgcttcttaacactggatcaaaagctgattattgtttattctctactttcaaacccgaacaaagagcttaaagtcaagttcatatggtctttaccactaccagaaaaatcatttttccaggcagccaaaaatcattttcttcaggtgggaggcgtataagcctacgaaaatagttgattttcgcaagcggcccaacagcttgcttgcgaaaatcttttcgtaggcggcacctccatctttgcaggcatcgtatccaccgctgtgaaaatatttttggcgaataaaaaaaatgccaccccaccccccccccccccccgccctacccacgtccggccgcgctgccaccgtcgcccctccctcctccggccatatctgggagggagggaagggatccaccgccgggaatcgccagcgcctggaaccgcgcagccactgccgggagggagggagcggagggaaaccaacgccgcctcctccaccagatctgggaggaagccgatgcctcctccacccctctacgtcatcacagccggtagccgccaccgccctcccccctcacggcggagccgccgacgcctcctccaccctccgcgccaccaccgcctagagccgccgccgccaccaccctctggctagctggatcccacggcgggagaggagaggtgaggtgaggtgagaggggagggagaggtgagggagaggtgtgagggcggagtgctctgacttagcattttggtgggtaggtggtgtttttaacatgtttaaccttttcgcagacagacctcttaaggtatcgtctgtgaaaatcggaccacttacaagggccatctgcaaaaataaaggtattttgctggggtccgcctgcaaaagtagattttcgtacgcggacaacgatctcgccacacgattgtcattttcacaggcggccatttagctccgagaggcatactcgcatgggaaaaatgtcatcgtctcgaaaaatggttttttagtagagtatgtcgtggggtagttttgacaagggataacctgatggccaagcgcaattggcaagtaaacattgttggttttttcataaagatgggacaatattatatttgttttatgagtgcagatttgcccgttttgtgtggtgcattatacaagtagctacagggcttttcccgcctcgtagtgtatccaatatgtttggtaattggctacagggaattaggaaagacttgaagtcgcttatcctgttaggggtagccactatttgttggacaatatggctttgcaggaataatatggtgtttgacaaaagaaaaatctcttctcatttacatattatttttttgaactttctacttccttcgtacctaggcaatccttcaaagactggttcgcggatttggttgcagcatagtgttagcacttgaagaatgtgatcagggagtgttttacccagggacatggatggcggtatagccttaagattgatgctccctaatttttactgctttccttctcttgttacaaactttttttgtgggcatgtgtatgctttggttgtgtgcattttaattatgcagaggctaggagttttcttagtatcgttcgatcaacttgatataatcatctgagattaataaaagctttctttattaaaaacatgatcgtagttttttttccgctagtaactagagagtttcatttatatgtaagtaagtgatgtcaatggtaataatcatgcgtaatactccttccgtttcatattatataagtcgtttgactttttttaaaagattttctaggtttgatcaagtttaatttataaaaaaatagcaacatatactacactaaattggttcattaaatttaatattgaatatattttgatacaatatttgatttgtattgaaattgttactatcttttgctacaaacttgatcaaactaaaaaaaaaacttgaccaagtcaaattaattataatataaaaaggagggagtacgaactacgaagctttagcgaaaatcaaggtcatttcagacataaccacggtaagatagggtcgaaggtgttatgaaacataaccatagtcagcgatttaaacagaaccatagttagttttgaaagttgggttgagaaaaaggcatcgggaatttgggataagtttaaaggcaaatatagagttgataaccttaacacacaccatttccccttcatgttcgtatagtaatttgccaacaattcgtccctgaatatacctggttcacggattacctgcgggctgcggcctaatcatcgtccacaccagttggctcaccaaaggcagcgtccacgcacaacacccaacctcctctgctgcagaattgcagggttgatacggaagattccggggtccccacctgtcagcctcagcaccagggctgacgcagcgagcaaggcaaagcaacctcgcattccttgccgcggaggtggggcccaccttgccacttgcccgccgttcaggccggccggctataaatacccgccgcctccgcctgcgccttcgtcttcctctccccaagccattcggcaaaagctctctcgagggaagcgcgcatccatggcgctcctcttccgcatctcgctcctcctcctcctcgtcccactcatccccaccgccgccgcgtcccaccaccactcgccggcgggaggaggaggagcggcggtgccgcttcacccgcgccgccaccaccgctccgtcgcgaacacggccacggcgctgttctaccccgccccttccatgcaccagaaccacatcgaggcggaggagggccagttgctgcacgtgctcgccgaccccttcgccgccgcgcccgccgctgccgaggctccgtccggggagaccgccatcgccgcggtgggagcggcggcggaggaggcgacccctacgctgatcgacgactccccgcagcaagcagcggccgcatcaccaccaccaccaccaccacctcctcctcctcctcctcctctcttcgccaagccggatctggactccacggcgccaccgcagccgaaggaggagggcgtggacgggtacgggtcgacgacggcgacggcgacggtgacagcggctccgccactcgacgaacctgctgcagccacggccacgaccacgaccacgaccacgacgacgcttccgctcccgaggtacagccacgtagcgagccctcctccgcctccagtccacgccggggtcgcgggcttgggcgacgagcagcgcctggagcagctggcgagggtgctctcctcgctggggtacaacgagatggcctcggcggcgctgctcctcgccaactcggcgttgctcgcggcgtggccagggtcgatcaccgtcttcgcggctcccgacgtcttcctccgcgcctcttgccccatgtgctcgcgccgccatgtcctactggagcacatcgccctgggctacttcccctacaccgagctcgccgccgcctccaccgccaagctcccctcggcttccccgggcttgtgcctcaacctcgcctccgaccacgggccgttcgccatccaccacgtcaggctctacgtcgacggcgtcgaggtctcgcacccggagctctacaacgacgggcgctacgtcgtgcacggcctccacggcttcctgccgccgctctcccacggctcgtgctcccacggctcgaatcatcgccaccactaccactaccagtaccaccaccaccaccaccacatcatcgccagttcggccgcgtcgtccgccgcgaccgccgcctccgtggtgcgcatcatgatccgggaggccatcgcccgcctccgcgacagcggctacggcttcgtggcgctggccatgcgcgtcaagttcgccgagctcgagaggttggcgaacatgacggtgttcgcgctcgacgaccaggcaatcttcgtcggcggaggccacgactacgtctcggcggtccgcttccacgtcgtccccgggcaccgcctcacccacgccgacctccagcgcctccacccgggcacgatgctccccacgctggccggcgagggccagaacctcgtcgtcacccagggcgcgtccggctccggctccggccccagagacgtgcgcatcaactacatccccatcaaggaccccgacgtggtgatcaactcgcgcatcgccttgcacggcgtctacgtgacgttcccgcgcctccacctcgccaacctcgccgccgcggtcgccctcgcctcctccaaccagatcaacgcaacctgcggcgtcttcggcgactgcgcctccgccgcggcgacctctaccactgttccggctgctcaccgctacggcgaagggcagtgatcgcgtgagtgcgtctctttcgtcctctgcttctaactagctaggatttagcacctgccggttttgtctgtctctgattaggatgagtaatgtgctgtgatgacatatcgtgctactgcctgtacggttctcggttcatgccatggatcagcaactgcttgaaatgaatgagatcttgaaagaattttcagcggccatgctgatttcgtttgagcatttacagaatctcatttctctctgctgatctggttgctctgtttttatctgctactctgctacttctgcttgcgctgtttcgttttgaagctgctagctaaaatttgtctcctgatgtgctatgctaacttagtttcatgcatcatcactgcattccccttagcacatgtggtttacgaagtggttctagttgtttgtctatagcttttctgacatcctctgccctgttggaaccgtgatgcttaatctaggaagtctgaatgttctgttaaagatgcgaatagaattcttgatcgactggtcaggctatatcaaattctgcaattgtaaactagaccaactgttcaattgtctatcacttgctctgtttcggtgatgaaattggtaagtggttgcatgcatttttgcgctaggcaaatgtgcaacctgcacatagcgtgtttagttcatatgaaattttggcaatccgtgtgagttgttggtttcttatcttatctgtgcaagaaatgtgcaaattctttaggtagtattttctgaagctgtgttgaatggtgtagcttcatttcccctttgtttaatatcagctgatctggttgacgtgtcatgagttcgtgaattgcgatcatgattagtgcatagcacacatggattaatgtgtataaatgtttagtgaacgtactgatactgatacatgaatcgttttacgtgctgtgttgaatttgtgttctcctgatgagttattctagcttcctttctgcaccactttatcatcacttgtgaagtgttgcaaatagcttgcagtttgtccgtttgtgtgtagttgaatttgcaggatcttggcgagttttgacattttaatgttcagtacagtttctgattggccaggttctattaacttctgaaataattacccttttgaggcctttagtatgttctggtttcgatcattttatcatagcttagttgaacaggtgggtgcatgtgcagcaggcaatgtgcaacctgtacatgcttgtaggcaactatggctgtgtatagttcagcgcaaagtttggattttggttgaaattagagattatgtgactcaaaagttgtgtgtgtatgacaggttgatgtgatggaaaaggactgaagtttggatccaaactttggatctaaacacagcctttggatcgtgctgattaaattggatgcagtagtaaatgtcattttgtctttcatctgtttaagaagttgtaatatgcttcaggcttgagctataccatgctccgtaactttgcaaacttcatttatgttccgtaatatgatttgcttttcaactttttagtcatgtactaacaatttagtccaacattttagatcatggacgtgcttagctgaatagatggtcgttttgaggcagagtttcaatcagtaaccagtgcctagctagtagctactcttcttaggtcctctttacaatagtatacatcaagcgtcctctcttaatcctctacgaatttgagcatgctctattgcctttctatgccatgcgtcgttgatcggttgtactgtcactatatcggagggaaactgttttaaacactcggatgaacgtctacccgtttcttacatgtcatctaaatggttatgaaaaattttcaaaaaaaaataaaaaattggcatgatacgttaagggagaatagccactatggtccctgaagtttcgctctgagatcgttttagcccctgacctttcaaattgtctaagcaagcccttaaactttatcatgtgggcatatatagtccttggcccatcgaaaattgccacgtgggcatgtcatgtcatcttccaatgcaaatatatgatgaaatacccaatttacccttacacatatcatcatagggaaaagggagataaagaaaaggagaaaaataataataaaaaagaagtaggtgatcatgcatattaaatatccgttagagttttaacattgaaatgcaactacttacatgaaaattatttggcatgataattatataattatttagtggttgtagctaatttaactttgtattagcataatccagtgaaaaaagtttggcatatatccagtcacattgaataaagtttgtaaattcatttcattatttttgtatggtacatggaagggtaaattggatatttcaccgtatattttgcatgagagcataacatggcatgctcatgtggcaatttaagtgggtccaagaactatattagtccacatgacaaattataagaactcgtttggacaatacaaaaggttaggcaccaaactgatcctggagcaaaacttcaaggatcatgttggctattcttccataggttaatgtgtaatatatgatctcacaaacatgcaagttcaaattcaacttctacaagttgtaacaaaaataacaaatttaactgtgaacatactatactagttagagtttaatttgttatttttgttataatttgtacaagtcgaatttgaacttgtatgtttgtgaagtgatgtattacatattaacctatcttataatttttttaaaaaagtttcataatcatttaggtggcatgcaagaaacgggtggacgtccactcgagatattagaatccatctttgatatattggaagggtaaataaatactctctcaactgtatgtgttctacccagtttctgatcaagcatctgcttgaatggatgttctgatcagtgatttgggggcgtatactttctacggtgattaaatttattttttagtctgttataggatagaaaatagagtccgggcgcacggtcagagacttcgatcgtgacaggatttacctttccgaagaaaaccgtgaaatttaacaaaccgacgcgggacgaaagattttggtagattttattcaaattcaattttgaaatgaaaaaccatgaaaaaaaactcaggaaaattcctatatatactatgatattactagtacatatggcataattgttttttttcaaagtatattgaatttatgtgaacttttttttatggatttacgtaggggtggcagtttcccgtcgggccgaggatctagcggggacccgcccctaggggggtgggagcgaaggagaattctcacccgtgggtgagtgaggatggggccccgcaaaattccggggatgggagcggggattggaattaacccgcgggtgatctagagggcctcggtttagacccggatgtgagttacttctctgaaagtagctcattgcaataatatagactcaccgagctcattcaaaattgacatataaaaactcaacaccctagttcccctcaactgtaatccctttcctttcttcaaccaacccacatcaccggggtattgaaatttcatcataatattattcagtatattgcaatatctttatgaagtattagctttatccgggtgatgcgtggccccggtcacccaccgggtcctctgtgggggcggagacgggtgatgtttttcacctgacttcctttgcggggccgggccagggctagggatacccgcatgaggacgggagcgggggcattccaatccaacccagccccgccccgttgccacctctagatttacgtgaacttgtagaacggggcagaatggggaaatttgaaaaagaaaataaaggcctcaacttgcgaacgaattcagttctctattcttttttatatcactcataaatgaattcagttttgctagaaattcgaaagtctcagtcacctaaccaagaagagagaaacgcttgcccatcaaaagagaaacgcttgagaaatgagatgaccagtagctggaggatgtgaatcgctagatgctgatcggagggctgactggctgaggacacaaatcgactgagctatagccgtccccaaaagaattttagtattttgttaagtacataatggttgaagcgaactttcagtaacttctagtatcatacacgagaatagttgaactttcagtatcattttttcctttgtatgtttcaatcactcgaacgtgtctagctcacaggtgcagctgatgcaatgcttgcctgtcctctatacatattgaacacaacagcagccacggaaataacttaccgtgaacagtagtagtcgactccgattgtgaagcacagctggcagacggacctctacagccggatgtaaagtagacgacaatatacaagaatttaacagttgatgcagtctacttcaggaggtccgctgcgcatgtagaaagccacacagaccgccaccagcagcaccaccggaatgagcagcctcagcaccagccacagcatcgactccttgctaccgtcactcctcgtgaacagccttctcagcagcgcggtgagtggccataggccatgcttcttgcttggcgcctgagttgtgcctcccttcaagcagcaaaccagcaacaaacagggaccaatggtcaaattcggtggatgaggtagtagcgcaggcacaagatggcagggtgccagaggagggagcttacttcggtttccgagtcttcaagcttgcttagcttcgaaatcatgttgccgtacaatttcgtttccttcctcttctgctccttgaccttctccttcagcctcctgtaccccatcttcacatccctgggaaaatgatccagcgcaaacttttttatgcataaataacataatgttatcgatgtaaggaacatgtgatttctgcatggaattgcatcatgtaatagaatattgctttggcttgatgggaatgagatataatagcccactccatatgaaccatatccagggattaaatgagatgtgaggtcatcatatgacagattcacaatccagtcatatacgactccaacaaacgggcaaaggaataaaagtaattagatcatcctaagaaaatggcctttttaaagataacgtcagtatggcatatggttcttcaggcttcagagtaacattgatcaaagccaactggaccagggtattacctgttgtctggatctatttctagtgctttcttgatatccagttctgccaaatcaaagtcaacaagatacatgtgtgcctgtgcccttctgtaaaaagccttcacattcatgctgtcaagctccaggacctgagcaccaacgtatggtcagtcagcttattcttgttaaaattatgtgagatggtcatcatgtttttattcatagtacctcagtacacagttcctttgcttccttgtagtctttaagcttcagcttacatgcagcattgttgagcttgcaactcaccttgagtggtttggacagctgcttctcttcttcactgaaggagctgtcatactggatgaagtttaaagcctgatatagagcaaatcatacttgcatcagtacagtgtaaaacaggtttaagtctttcttttaaacaaaaagcctgatgtgtgacctttccatatctcttagaagccctggcatacttttccatcttaaaccaagcattcccttcatctttcttctttgcagccgcttcaatcttctcagtattctccttcatgtcccatgattctttctcctgcacaaaaaaagcatatgagatttagattttcattagcaatcagtagatgttaagtcagagatactgaaattaaaggttagttaccttatcgaaggacacaagctccacctcataataaacagttgaattaggagggacaacagacaaatcttgtcttgtttcatcagatccaaacgcatactctggtggaatagtcaccaatgcaacttctcctttcttcatgctaagtactgctttgtcaagcccttcaaccacttggtcttcatcagtcttaaactcgaatggctcgtcaccatcatgacctcttgtgacaaatatggtaccatcctctaactttccaataagtttcactgcagagtacgaacattatcattttttaacaaaatatcattaacagtggtttcactcaaagattatcatgtaatagaaagagctcaacacatgagaccacatacctctgacaagtgtgcaatcactgggacgctcatagccttcaccctcatggaggatcttcttgaggattttcttatcattaccaatctcagtgactgccttccaggacaccaattcaagattaatgtgcaatgtagcattagggggtattgcagcttcatctctagcggctggcctgccttgctcaccgaagccatctattcaccacaaaaaatgagacactattgctgcattggaccaaagaagtcttagccatattagttctgaaaactcacattgtggtttgactgtgaggagggccttctcattcttcttcatagtcttcacagccttggatatggcaggacagaaatgccctaaaaggaaaacattcctatgtgagaaactgacctttcaaaactttataatacaaatgttcaaaaatggacaggattgtaccatctttcacggtgaactcgacaccatcagattctgctacaacagtcccatcctcaagcctcacctcatacttaactgtaccaagcaaaggaatacacatatagcatattttgtccctaaaaaacgcactttgccacaacacaggagaaacatgaatactgtaccaaaaacttcatcgcggtctcttgggttctcccacttcgtgccttcagctagtaccttcttcaagatgccaccgtccttgcaaatgtccttgacactttcccaggagataagctcgacatcaaactgcagcgtggcatttggagggataactggaggggagccatcctcaccatatgcaagctctggtggaatggtgaaaatagcattctcacctttcttcatggtcttaatgcccaaatcccatcccttaataacttggcctgtaattagagagtaacatcatcatttaccttataatatactgtttgctaaatactccctcctctcataattatatgatgttgttggtggttatattgcaacattaagatggaaaatacaaaatcatgagccagtggcctcctacatgaaactaacttaaaagggaaaattttccttgtacaaggaagcttaaatatacaagaagaaattcaagcagctagatttgtaaggaaaaagaataagccacatctagtgatttacaaataaaagttgcaatcatctaatgctctcctgtcacactaatgaagagatcacctcatatatcttttcagcaccattggaatggtcatctaatgtctgatcagtcatccatgcaacttcgttatgtgagctatttgaagataatctggtatcctagtaacttgtaaaatttttacaaccagtccatgatactactgtttcggaaatcagcacagtaacgatctgatctactacagctgcttctcatttatgttactgttatataccctagaccattcatgtagtgatgaaatacactacatgttaaacctagtcttggtaattaacagtcaagatcaaactcctgaagacgaaacacgcatcaatcacaggccgagcagagtattgtaagtgagtatgccagttttttctgccagcctgcatcctacttggtaggtaggagtagtagcaactagcaaagaaaattccacttttgaacaagaacaattgcgaaattcgagtgctactagtagtagaagaaagggtcgctttgatcctagcttgcaagacgaaatgggatccgatcggatcgatttgttaccttggcccagggtgaacttgaacggagcatcgcgatcccggctggaatcgaacttggtgccatccaacagcgtccccgtgtagtgcactgcgtcagcgtgcgccaacccccacacacaacacaatccatcacaaaaacaccaagtcaacgaccatctcagcccaaaaaaaaaaatccagaaatcaccaaaaaaaattcctgagaagcgaaacgcaccttggacctcgtcgccggcgtcggggcgctcccacccctcgccctccttcaccagcttcttcctgagcccctccttcccgatctccttctcctccccgacctccatctccgccgcgtacggcccctcccctccctcctccccccccgcacctcccccgccgccgtacaggtcctccatgcccccgccgccgaagccgcccagtccgccgaggccgcccatcccgccgagcccaccaaggccgcccatcccgccgagcccaccgaggccgcccatcccgccgaggccaccgaggccggccatcgcgtccaggccggccatgccgggcgggtagccgaggtcgtcgtcgtccattccccccgcgccgatgggaagctagcggaagcttctagaagggggacgtgccttcttgcgatttccgagactgatgagagattttcctttttctttttatcgcgtgcgaaagcaatgggggtatagcaatagcagtgtgggttctagagagttcttgggagttaagcggggatcagtcagtggcggcgactgctacatcgcgcttgacgatgacaggtggggccggggtggtggtggggacagaatgtcagtgactggtggtgggatgtgacgcgactacgcgggagtctggaaaatggcagcttcagaatagtagtattgtaacaagtgtagaaccttctctagagagtgtagttaacggcaagcttatgccagtcggtgggaggggggtcgttggccgttgtggaatgttctggaatgactaaaatttgtgtggagtttaaaatatgtaaaacaacatgatacttcgtgttttgctgcggaatccataaattaatatatgcgaattattgtacaaatgattgataaatgttgagatgttattgacacgatgtagagaatatgatgtgccatgcttgtataatttaagatgtttataatagtagtacttcctctgtttcataatataagggatttttttttcttattcgtcttatttaaaaaattttgaaattattatttattttatttgtgactcactttattatccaaagtattttaagcacaactttttgttttttatatttgcacaaattttttgaataagacgagtggtcaaataatgcaagtaaaaagttaaaatcgcttatattatggaacggggggagtaattgctagtgggtgatgattatacttgcatgttgagttttaatttttaataattgctagtaggtatcacctatataaaaaaagatagataaatgtggctaaatatatggagggtttgtttggatccaagccaaaaatttgccgattcatttttttagcatcacaaccatttgtctggtttactatcaatgtttccccacactaatgcaaattctattgtatcaaatttgagaggacaatacttacaaaggttttggcactaccaaaatatgacaaaatttactacaagatacttaaaagtgtggtatttgctggtaaatactgtaaaaacttaaatttgcttgaggacatttagatatggggtaatttaccatatgactgtaaggctattaaaatattatttcctttagagctcgagagagaatttaactaaaataactttgctaccatgacttcttccgcccatccaaccagcaaaagggatggcaaaatcttaccgacagcagaggaagcttccagtggcgagaaggaatagagagtggcagtgatcaggatggccgcctcgaacttatagttttttacttcctccatcccatttttatcacccctaaggttttgtgagattttttttttaaatgatcatctaacaagcgttcctttgtttgtttatttgtgcaaagagtaaatgtacatcataaaatgtattgtatgtaaccaattaagattaatttctattggtgcaatgcatgcaatatttaaaacattagcaatctatgggacaagaagcgatgaagcactttaactgatgataactaatttgagaatgataaatattttcgtatccttaatcttagtgtcatttgcttagtgggtgatcgaattgggatgggggagtagtgtctacccacaaatatcacactttttaagtatcatgtagcacattgtgtcatcattttcttaaggctaatggcgtcctcagcctactagtcatatttcttgcttttctttctttattttacctgagaagatatgaacagttatcaacattttaggtgcgttcttttatgctagcgggatgatcagagaaatgcgcatgcaaacggtgtgattttgtttaaaaaaatgaatttctaagataactactttaaaagtcagttttcaatttaacaatatacaattcatttattagtcctcttaaataattatcatagatcattcagttattcaatcatccagcacaaaacaacaacttaaaatgtttgttttcgtaaccacaattttatctcacgttgccatggcaaaaatttgtgagttaattaggcaaaattgtcacaaaattttgcgagtcaattagactgtttggtcggtagctatacttatggaatatttttatacttcactaggtacacctcacatgtcaacgatatagaaaaggagtggcgaagttaattacctattgctagccagagggtggttccaatttttattatccaaatctttgtcaagttagtgaaaaaaaatatgacatgcttacttaaccaaacatcgatcccctatatatataccacgcaatgcgccagatagtagccacattctccacatagggaaaaagcagatggtgattccagtgctggctagcttgagagaacaagttaataatttgaaattccaattttccttattgccaagccggcctgtccacctcagtgtattgcaaggtaactcgattttaaccatctcctcagagtccaggctgttaaatacttaaacgtacatgtcgcctagccgacttccagctgacgaggccacatgttaacctatggagggcggctggtgcttgtcaactaggtgctctctgcgctcccatcttacatgatgggagcaatgcttcttccaaaaggaatcattgacgccattaataaatgttgtcgcgctttcttttggacaggcgaagatagttaccacggtggggactgcaaagtggcgtgggatgttgtttgttcccctaaagacaaaggcggggttggcatcaaaaacctctatgttcaaaacaaatgtcttcttcaaaaattcctcgtccggctacaagaacctggggaccctccatggctactctgcttccgggagaactacggctggtctgcgactgttaaccttggcgaccccgtccctcgcccaacccagatctggcgtgatatttcatctgggatcccagaatttcgacgacacacttgtgcgatccttgggtgacgggacttccatatcgttctgggatgatcagtggatcggacagccctttgcccctttgcccaccgcttccctgccatccattctcactgtactcggccaaacctttcagtcgcccaagcactctcgtcaaccgaccttcagttgtttctttgcccccgcttatcaaacgcagctttgcgtgagcttcaagagctccgctctcttaccaactcgctaagtgtcatggaccaaccagaccgtcggctcaccacttcttttcatccaccctccatgcttgcagcttactcccagtgttttggggtagctgcaacagaccccttctggaaaaatatttggacgaattttggtcagacgaagtgcaaactcttcctgtggactgtacataaatgacgtatttacactaatgagcgccgcttccgcagaggaattgcaccctctcctcaatgctgcttctgcgactgcgccaaggatgtggaacacctgttccttcgctgcatgagggctgctcgggcctaggcttccatgggctttgatgaacaacgaaatcttcaaggagtagatgactccgcctcccaagtcagacgtaggtgcatcgatgaccttgcgcttgcgctctgggtacatcgctgcccagagcgactccgcccgtcgctcagctcctgggtgaataatcttagtggtgtaaggaatacttgagacccttccttttcccccaccccttgtaaatatctttatacttgtaattggacgtcttatatttttaataaatgttcaggctggtgttaatcacctgctatagtttccttaaaaaaaaaactctggaataatgaactcagacacaaatttgactatttaaggcaggattgatcatcgtactgtgatctgacttccacaaggagaatgctactgctaattacttgtgttcatcggactatggtgtgaacatgtctaatttacatagcatatacaattattttttaaaggagagcaaaaagctttgtctagtactatgtattaatagagagggagcaaaagtacaaagacagcatatacatcaacctgtggaatttcattagataggtaaatacaaacttgatcacagcgcagttccctattacatttttatttcacaaagttcaatataaacttactgatgtgttacaacttgcaagaatgagatgtacaatacaattaagtataacgtaaattaacttaatttaatgtaaaaagaacaaatgaatcatcacccatggataaagaaacaactttgtttagaaacttcagaactgagcttgaatccggtctactatcttcttctccacctgaaaggccttggcaaggatatcatctgatatgaacggcttcgatccaaacaccgcatttgctatggtgatgactccagggttctggctacttagagccgcaagggctataacatcttttgtaccatagttgaactgaaagtggatcaacccctgaggaaacacgaatacgtcccccttgttaagaaccttggtgaacagcttgttctcggggttggaggtaacgaagccgacgtagagtgagccctccagtatagtcaggatctcggtcgcacgtgggtgaatgtgcggagggttaagaccatagggcgcatagtcgacgcgggccaaagagatgcccaaggtgttgagcccagagatctgggcgacgttgactcctgtcacggccgatccctgcctgttgctggtgtttccagccatgtgaaggccggagaagaagaagtcttccacggtgatggccgctgggtccttgcatgcaaatccattgactagaactgcaagtttgcccaaacatgtagaatagttcaatcggattagttaacaacaaaattaccctgtttaaccctaaagacaagtacacgctatattactgatttaaatgcacatataagtaaaatatatggaaactaactgtagcatgtttgcagtattaccttgcgacatcttgtcagcgacgcagaagtcctggagttggctgggatcggaggcgaaagcattcgaaatcgatacagccaggagggcaaggaggaagaaccatgttgaggccattaggagtttaggacactaatcactaaatcaagtgcgtgtcaattttagcaggaaacaaaaggatgcaacgcaaagtttcttgtgatgtgatgaactgatgatgatgctttgctgtgtgcttcaaacggggtgagagatacccagtatatatagagatggagtagagtaggaggatcaagctggcttgtgcttgctttgtgttgagaaagttaattggatgtttaatatgtattgaggtttgaagaaatggtctacgccaattctctggtaatttggaacaagtctgaataaacgtgttgtggcctgcctgcagcagcggctacagcaaattcagtaagaagctaatatagcttctgactgattcttcatcatgtgtaaattgtgctctctccaggtggactcgatggtaacggcacctgcttaaacaaattacgtcaagcaacaatttaataatggctatgcattacgcgttcgtcgttcggttaacaaattctgtttgggaaaactacgttttaattaggtatcattatcattgagaaaggcatgcagcagttagcaccacaacaaggtgtggattagtcgatgtactcggtttcaaggcatgcagagtcttaataaattttgatatgggagtccgtcctcttatatccaacgtttaattaggcataattttgtagatagtataggcgtgtagtcaatcctctgtcatttcggttggtcgaaggagttttaatcccgtcttcttggaaggaagcaagcaatgaaaagcaagcattattatttccttacgtgcatttttctccggaacaaatatggtgttaattttaattgctatgatgagataagaatattacaatggagatcggaccattgtcaatcgatgatcaggccggccggcaaacagcaaaccagtaaagaattaatatgatccatatatccaccttggacaacattaatagccacggctgctaagtctgcagatacagtactcatccatggcttagacttcttcaagcacaaagcatgtatgataacattaataagatttatttcaggatagataggtatatgtatctgcagactgcaggttgcccatccacgcaatattatgtattttatgtatgacgccttcttcctatctagctactagctagcagtgactcgttcttggtgctgtacgacgcatgcatggcatgcacagacagacaatattctctgtcatcacaatcattaccagagatttcagagttcaataggctattctgaaacctgaactccccctataaataccagctttcctctcaatccatgacattcttcatcatcagttcatcacaatatatatatcatcagagcaatctgctataccataagtattcttttctatagagaactctctgcctcctccaggctccagctatggctgctgttggcgcctgcttcctccagcagcttgctgtcgttgccctcttggctctgtggtgctctcatggcgccatcgcctccgatcctggccttcttcaggacttctgcgtcgtcgacaagatgtctcaaggtactcgatctgcaagaactccgcatatatatactgtaattttgtgtgactgaccatactgatgattctgttcacggatccatatgcagtgcgtgtaaatgggttcccttgcaaggacgccaaggacgttgtcgccggcgacttcttcttctccggcctccacatggccggcaacaccaccaacaagcagggatccaacgttaccaccgtcaacgttgcacagatcccgggtctgaacaccatgggcgtctccctcgtccgcatcgactatgcgcccaacggcctcaacccgcctcacactcatccacgtgccaccgagatcccgaccgttctcgaaggatctctctatgtcggcttcgtgatatcgaaccccgagaataagttgttcaccaaggttcttaacaagggtgatgtgtttgtgtttccacaaggattagtccattttcagtttaacaatggaacaaacaatgctgtggctcttgctgctctgagcagccagaacccaggggtgataaccgtgggaaatgctgtttttggatcaaagccatctatctcggatgatatccttgccaaagccttccaagtggacaagaacatcatagaccgaatccaagctcaattctagagaatatggggcatatatatgacatccattagtgtgttcttttattgttcaattgtagaatgtggtttttggtattgatgaattgtgatattatcttgtgttgaaggaaatgttcaaatttgagtgtgattcatctgaaagaaactttggctatgtatgttaaagaaaataaactaatctttcagtaagatcctctctatagagtggcctccttagaatatttttttaatacatatacactatctatattttttggaactgatatatactatatctgactaaagccaaaattgaaaggttgccccaagtcccttgagattattgacaatcacattgagccttccatacatgtcattcacactctcatcgggtaacatggcaaatgtctcatactgaatcttgaaaaagtgaagcttggcatccttgtactcacttgtgccctcataaattttacgctccatgttccagttctcataagctatctcaagattgctaattctatcaaaatcctcttggttcaaggagttgaacaaggcatttatggcttgggcattgaattggagattgcgatggtcaacattcttcaagttgttgccggtgatagcaaaacatacatcaacaatatttcaaatgtggaagctcatagccttaaagtgagtaaacatcttattttttcaagtataataatttgttccattatatatgggagccttccccacctcgtgcgacatcttctctctaggcaacgaagcccaatcaagagagacctagctctgataccacttgtgggattgagctgtcgactagaggggggaataggtgatattaaaaataaattacacctaatcaaaactaacctaacttgctaggcttggtgaaggataagactaactaagcaactagattatgttttgcaatcctagggtgataggggctcaagtatgtttctatgaatgtaaattgcacaatagtaaatgtaataaataaatgagacaagagacaagaaatttttcacctgaggttcggaaactcgcaggcttcctaatccccattgaagcgatcccaacttcaccactcaaaccacgaagccaccgaaccccttcgtcaagaggtgggcaaggtgggagccagccccgaagtggactaaccaagcttcgatcattaaggtagtttatttccttcacctcaaaggcggtgaactccaaaccacacacaaccaacaccaagcctcttccacaatcttctcggagaggtcatcggacaacttctccaagccgtctaggaggtggcaacctacaagagtaacaggcaacacttgactcggacatgatcaagtgccgcactagctctaacaatacaatgcacttgtcttggctcaaacaaccctccaacaccaacaatgaatgaacaaatgctcaagaggcgtgagagtgagtacaagagatgtatgcaaatgaattatgtgccaagaagatccccttgctgctggtaggggagtatttatgcccccacccacaaaaactagctattcggggtgaaatccccatcctcagacaggcctccattttaacagctacaaaactagccgttacactgttacaatgcatttaatgcatgggcgatggctagccggtctgacagccggattgggatcgctatagctactgcaacttaagcagtcctatggccaccattggatcagaaattgacgtcctagatctcacctaaatactgttcacagaaaacgtattcctgtagcaggtgctgtagctgttactgtataaaactgttgtagcatcagtttggaccattgattgccttgatccaactatgaaaaatagtcccaactgccaaacttgcagtctctaactatgactgcactggatccttatccctgacagccattggtctaccagtcagatcggtcgcagcgcggtcacactggtgtcggctctattagctctggatcaccaaacggaggccatcacaccggctcactggctgcccggtcagaccgagcccgacccagtcaaaccgttaggacatgccgattagaccggtctcaaacagaaaacatgaagaataggtcgaaccaagccctcatgcaaataacctaatgtggcattttgatcacttctgcgctgaagtattaccgttcttgatagtatggcaaagctagaaataaacctaccaaaaatccgatcgcccaacaccgcgctcgattaaaataaaatgctagatttatcacctttatctcattgccttgcgccatcaattttaatccgttgtaatcatccaatgtatgtacatcatgtggtcttaactgaaatatatcactcgaatagaatagttagtctacaattagtgctcgtcactaattaccaaaattaacaacggggtcctagatgctttagcgcccttggcaaagcttcatagtggtaatagctagaacctagaacaactgaacacagcgatcatcactttgcttcttaagaaggatgcaccaactttgatcaaacactttagacctattagcttgatacatagttttcaaagctggcggcaaaaataatggcgacaaggcttgcgctaagaatgggggaattggtggcgacaaatcagacggctttcagtagaaaattttgtcttagtcaaaggcttggcgatgcagtttcaaagaggaaaaacccaatgattttaagtcacgaaggcttttgacacgatctcttggggtttcctgctaaacatgctgagaagccgtgggtttgcagccaggtggcgcagctggatttctactcttatcctcacagctgaaatatcaattcgcggtgaatgcaaaagacagcgacagattcaagcctgtgaggggattgagacaaggcgatcctctgtcgcctctgctcttcgtcctggtaatggacacactgtggagtctcctggcgaaagccacctcgtggggattgttggcaagtttggacgttagaagaccgatcccccaacacctctatctacacggacgacattgtaattttcttctgaccgatggaacaggaggcacgagctattttcccaatcttagaactgttcgggaatgccatggggctgagaaccaacctgggcaagagtgcacttacaccgagtcaatgtgatgaggacagcacagagattatcaaaagcttgttaatatgaaagagtggaagtgtttccaattgtttaccttggtctccctctttcggttagaaaccaacaaaagcagaggtgcaaattcttgattggcaatcaaagaaggtagcagggtggaaacccaaaatgctatcatccgatggaagactgcgcctcatcaagtctgtgctcacggcgcttcctatccacttcctttctatgctttagcttccaaattgggtaattaaagaatttaacaagaaatatcgagcctttctgtggaaaggacaggaggaagtgaatggtggccactatctagtagcttgggttgtgctgtgtagcccgattgaatgtggtgggttgggcataatgaacctggagtttttcggccaagcacttcgactaaaatggctagcacaaagactagagcagaaggggcggccttggactctggtgaactcaagaccaacaaccgataagcaagatcttttcagggctgcgagcactttagaggtcagcgacgagaagggcattaatttctgaagagaaggttggctgcccagtggaagcataaacatccattttcctatcttagcaactttctcggcaggacaaagctgacaatggcacaagggttagtgcagcattgttgggtacatgatctcaggggaagcttgtcaaatgacacactgatggagtacttcatgctttgggacggaatcaatatagtacaattacatggggagattcaagtgcaagaagaggatcaagagtccatcagatggaagctaacagtgaatgggatgcactcggcggcattggcttatgacatgttcttcatttcacgcatccgctctcttagtgttgatctgatttggtaggcaagagtgccatcgcgcatcaaattcttcatgtggctgccaacaaaaggaagatgtctcacgacagataatctgcaaaaagttgtggccgcatggggatgtgtgtcctgtgcaatatctagaatgagagctacgaacacctattggtttcatgccgcttcacgaacagggtttggagaatgctgacaggatagttggaggtgcagttcctactgctagaagaagggatcgaagggctatcaaagtggtggcgacaagcccggctaggttatggctacagggaggccttcgactcgttgtgcatgcttgtttgctgggtggtttggaaagaaaggaatgtcaggattttcgagcacaaaaactgcatggcggcgtaggtctacagggctatccaggaggaagtcctcgtttggagagaagccgacgtgttcaaagaatgagagtaaagctcagggaaagcttttttgttttattttggggtctttggtttcccgctgatctccctacttcgactgtttaaagtcgaactgtaacttggactcttgctctttcttgttaatacaattcggtcggtcgattttcagccgatttggcaaaaagcatatgaaaagtcaaaattactgataaatgaaaggggtagttataaggcagcgtatcctatgcacacaggccctcgcgtgtacacaccgtgtacaccaactaaaaattatcacaaaaaattctaggaaaattcatatatgtactttcaatagtattacatctacgtgtaaagtcgcatcttcaaattcattctacatagagaataacaaaaaagataaaattctgacaaaattgcaaccttaaaactgtcagattttttgttttttttgttacggctaaaatacaatgaatttgatgttaagattttaaccctaggtgtaatacaattgaaagtatgtgtatgattttttctagattttttggtgacattttttagttggtgtgcacgtgtgtacacgtgagggcctgtgtacatcggatatgttgcctagttataatccactaagtgcatttaaagttatgaaggagccgtcacgtaagccacatacgactacatatttgattttttggacgagatccccattaagttgcaggcaagccataagtgctcttgcctgcaaaaatcgctctcctgagagatgcggccccttaagaggtccgtatgcaatgatagcccatatatccccacccagcccaagctacacccatttgtaccgaaagtttctctacaaaacgaagtaataaataggtggaaggttttctacttaaaatcgatcttcccgtgcagttaaaccggctgcatgccaaaatgatgattttcgcggacacctgcgggccgcccaattatacatgcaaagatccattttggctgcatgtaaaaaacgattatgtactagtgacatcattaaaactgtcttaacacattggttcgatatatatctctcttaaatatatgttgtcagatcaacattcgtgtgtaatacaaatgagccccttatatctggcagtcaattttgaattttaacaaacagtttctactatcagctataataaaatactattaccatcatttaatttcccaaattcctccatatatgtacatctaaatattaaaaacaaatccaagacagcactggggtaattatatattaaggtataacaatttggtacgtagatgtaataatttagtatttttaaacagatagagtactagctagtagaatacacatcatatattcaaagtttataattctctcctaacggtacaatagagatagtgaagtggtctctaaattatacttcctccgtttcgtattataagcatttctagcattacccatgtttatataaatgttaataaatttagaaatgagcaatgctagaagatcttataatataaaacggagggagtacatacacagagagatcgggagaaagggtctttaattcgctagcgctaatgatatatatatctccatcggaatatgtcgacatacgtaattaatgtacactcagaacatgtcgaacctgcagcagctgcggcacactgttagccaacaaacattcaaacagcaagtaaagcgaacacggaaaagctctcgtataagcggatgagcctgacaaatcgatcatgaatctggtttaacttttaacgctgtcacgcatcaccatatgaatgcatgccgtgatccaactatccttcattgaacataaactaatttagcgtcgtatttcctaattaatatatataatttgtcgtcattatacaccgttgttagcctccaactggaggttatacgtatagtatacacttagctttctgtcgtgaaatgcatgcgacctgttcaacaattattagtttcctcgtaattattctattctagccgtcttcgtgtctattatatccacatgatgcatgcacgccggctgcacagataatttgggagtaccaaagaaactactgcaattttttttgagtaaaagaatttttagatgtaattatcgtataattgaaatgtaattatattgtaactacatttaactgtattatatctgtattataattacgatataacttatataaaacttgcattcaaactatagtttggttagctggaaccgagatcttacatgcgatatgtgtgaaaattactttctagtaattttttccttcatacacaaatcttgaggcaatccgatgatcacaaatataaaaattttaggggcaaaaaaatttgcataagttttctagcaaattaataacaagatcgatcgatttggcttcctaggccctagctagcttaatcagtttctatagctaatcctccctataaataggcttcctcgccattctcactgatcacacacattcacagaatttagcaagttaagctcgtatagctgcttgctaattaatttatgttaattagtagctaacctagctgaccgatcgaacgaagcaatggccgccattcgcgcctccttcctccttgccgccgccgctctcctggccttgtggtgctctgaccatggcggcgtcgtcgcctccgatccgagccatctccaggatctgtgcgtcgcggacaaggcgtccacggtgcgcgtcaatggcgtcgcttgcaaggacggcgaggacgtcgccgccgaggacttcttcttctccggcctccacatggccggaaacaccaccaacaagcagggctccgccgtcacggcggtcaacgtcgcgcaggtccccggcctcaacaccctcggcatctccctcgctcgcatcgactatgcgctgcatggtctcaaccctcctcacacgcatccccgtgccaccgagatactcaccgtgcttgagggctcactctatgttgggttcgtgacatccaaccccgagaataagctgttcaccaaggttatcaataagggggatgtgtttgtttttcctaaggggcttgtccacttccagttcaactatgggacaactgatgcggttgctatcgtcgcactgagtagccaaaaccctggggtgatcactgtagccaatgcggtgtttggatcaaagccatccatcacagatgatatccttgcaaaggcctttcaagtagagaagacagtggtagaccaaatccaagctaagttctaagtgctcagggtgatgtggatcaagatcaatgtgtttatggaacagattatgttttctcttcaattgtgttgcgtcctctgttattaattcgattatattttgtgtttattgagtctgttgtggccttgtatgttcttttatttctgaagtaattaaagcaattttcttcttatagttggtcgtcaacttctccttaattgtttgtgtgaccctgaaataactgttacttttgaagattaaaagatgaaaaatatgagatggatgttaattcaagcatctggctttattggctttatcatgtgcttctagctttaggtgctcacactcgcacattttaaaacaaacacttggtaacatatttaatatttgatgccttggggtgccatccatcacccccacaaaacataagaaatggacaaatggacaaatgcaagtgaggtcatgattaagttatactaatatgattcaaaggaatagagggtttaatcttttcgaagaaaaaactacggcgtgtacaactatggttttaccttaaaaaatggtaattgaattagaattgcaaagtgggagaaagtaaagtggacaaaacaaacataaaagacaaacctatgaaaacaaatcaaacctgacaaaaatagaaacatttttcgaattcaagagcactaagaattttcaaaaaaagaaaaaggagtataactttcatcgtcgaaagaactaaaagtgtcacatccagggtctaatacggttcaaacatctaactacatgtagactgtagagaagatgttacattggtagccgcccagcaaattaatccgtacctccgtattttgggacgtataggtagtaccatagggaatattcttaatctaatttttatgtaactatccattaagatttgaaccttttaatatcaagaattcaaggaaatttacaacagaagtagttggggtggcagattcactgacacaaccgtgcaaaggacccaatgtgcatgctgctctgcttgtcaattgtgaccaagcaataaaacacttcaggactacaagtagtataattacattggaaaatatggagcaacattttatggtccaagctgagtttcaattcatgagcaaactactagtaattttagacagtatttacataaggatcacagtgaaaggagatatataggttttaatggttcatctggacacggttgatgagcaaaagaacgtacgtgtaattaaaattacctaaaccactatggtttgtctaaggcatcggatgcatatcctagaaaccagtaaaagatagcaactccaatctttaactgtaatcctgaacaagttcagcatctacgtgtgccatgatggtgttaacccaaaggttccatatcgacgctgtctgacatcttcaaggcttgcaaagcctcgccgcacaattccaattagagtgataagcatgttttctgaaggactatcatgcttaggaatgtctgcataataaacacatcatagaaaaaaaaaggggcacacggagcagcagttgtgttatttgggcatgtttaattcatctgtggttcaaaatctctatggtttagctcctctatgcagtagatcagttgcagcaaggaatagagtgcgaacaatgaggttatcaaacaatatctcagtgtaaccaaagggacaaaggataccttaatgcatttttcatctcaatattctctggttccaacttgagaccatcaagaaattgttagaatttcaatggttactctcattgagaagaggatggcactcgagatggggcaattttctggttttcttcattcactaaacacaaaagccatacctacccgagggaggttggatacatatatatagccatagctggctactagcctattgctgcaccctcctagtctaaaattcgaaatttgaatgggatgttgtcctagagggcatccaaactgaataaagcataaaggaggcataaaggagatgctaactgctgctgtcctactaaccgcagctgtcctagcaactgaaaaatatgctaaagggtagatgctgtcctgaaaaaggtgaaactacccaaaagcaaaaagaagaatcacgaccaaggaccacaaagacttatccaacattctccccctaagtcttgtgcgtcgtcttgtggggaagttgggccatcccgatcctggagcagagctcgaggaacttgatcctcccaagaggcttggtgagcaagtccgcaagctggtccttggtgttgatgtagctcgccttgatgctcccttcctccaagtagcttcggatgaagtggtacctcacccggatgtgcttgctccgttcgtgaaaaacggggttctttggcagggccagagcggacttgctatccaccctgagctccaccgttccagtgtctctgccgaggagatcactaagcagtcgagcaagccagagcgcctgggtcaaagcggcggaggccgccatgtactcggcctcgcagctggacaaggccaccacctgctgcttgaccgactgccagctaacgaggcacttgccgaggaagaagagaatcccgctcgtgctcttgctggtgtcgatgtcgccggcgtggtcgctgtcgctgtacccgatgaagtgtgccttgccaagacacctcgggtagtagagactgtggtcgagagtccccgcaacgtagcggatgatcctcttcacagcctgctggtgctccgtcgtcggtcgctgcatgaaccgactgacgtagccaacggagaaggccaagtccggccgtgtgtgggtgaggtagcgaaggctccccacaagacgtcggtactgtgtagcatctacctcctccgccatgctgtcgcggctcagcttcagtctctcctccatcggagtgagagctgggttgcaatcggtgagcccagccagctcaacgacgcgcttggcgtaggcggtctgtcgaagtgtgatcccggagttgtcctggtgcacttcgatccccaggtagaaggagagaggccccagatcactcatctggaaggtggccttcatctcctccttgaacgccgcgacctccgcatccttggtgccggtgatcaccaagtcgtcgacgtaaacacccaccagcaaggcatttcctccattgccccgctggtagatggccgcctcgtgcgggctttgctcgaagcccatccccttgagcgtggaatccaacttggcattccacgccctcggtgcctgccgcaagccgtagagggccttgtgcaggcgtagcaccttgccctccttgccggggatcacaaatcccggcggctggtgcacgtagacctcctccttcaagtcaccgtttagaaacgccgacttgacgtccatgtgatggatgccccagccttcctgagcagccagcgcaagaaggagtcgcacagactccatccgtgccacgggagcgaaatcatcgtcgtagtcgatcccctcctgctgcacgaaaccgcgtgccaccaagcgagccttgtgcttgacgatggctccggcttcatccctcttcagcttgaacacccacttaagggtgatcgcgcggtgaccacgagggaggtcagcaagctcccaggtgcggttctcctgaaccgggtccatctccgactgcatcgcggcacgccatgccgcgtgtttctcggcctctacataagaccgaggctcaccgtcgtcgcacgcaaggtgcaactgcgcctctaggtcgcgaggcaccagtcccggcaccggctggtcgccgagaagatcctccattgtacggtaccgtagctgctcgccgtcgtggtacgcgtcgatgcgctccccgtcgtgggagagcggagtagcgaactccaccgggctgcgctcaacacgagctggcgtcggagtagacgtgcttggaggagtggctgttggtgctggagcatgtggagtcactggctggggttgtatcgacgaagagctcgtcgtagtcgaagtcgtggcccgagggtgtgttggtgtcggagtcggtggagattcgggggctggggtagacacgctaggtgaagaagagctgcctactcccccagctccctcgaagtggacgtactcgacggtgaagtcgtcatacatcggagtcaaaccatcgtccaccgccttgtcccatacccaccctcgcccttcgtcgaacacaacgtcgcccgcagtgcgcacacgctgtgtctccgggtcgaggatgcggtaggccttcgagccctccacgtagccgatgaacacccctggggtgctcctgtcgtcgagcttgccaatgtggccaagctccttggcgaacgcgaggcagccgaagacccgcaggtgggagactgccggcttgcgcccatgccaagcctcgtacggtgtcctgccatcgagggccttggtaggcgagcggttgaggatgtaggcggccgtcaccaccgcctccccccagaagatggccggcatccccctctgcttgaggagggcccgagccatccccacaaccgtctggttgcgccgctcgatgacgccgttctgctgcgggctgtacggcgtggtgtagtggcgctaaatgccctcatcagcgcagtacgacgcgaattcagccgctgtgaattcgccgccgttgtcggtgcgcagcacgcgcagcttgcggccgcactccgcctctgcagcagcctgcgcatgcctgatggtgtccgcagcctctcccttgctgccgaggaccatcacccacatgtagcgggagaggtcgtcgacgagcagtaggaagtaacgtcgtcctcctggtgtggccggtgtcactgggccacacaagtccccgtgcacgagctcgagccgctccttggctcggaagctcgtctgctggggaaaggggagccgccgctgcttcgtcaccacgcagatgtcgcagagctgctccacgtggtcaagacacggcatgcctcacaccatctccttggcactgagctgcttcagggcctcgaagtggaggtgcccgaagcgctcgtgccactgccacgcctcgtcgtcccgacgagcggcgaggcaaactggttgtgcgacctgcgcgctgaggatgtagagtcgattagtgcctctggttaccttggcaagaaggcgacgacggcgatcccaaatcctcatgagtccgtcctcgaccaacacgcgtgagccgttctcatccagctgtcccacgctgatgatagaattcctcaacgcggggatgtagtagactccggtgagcagcctgtgctcaccggacttggcggtgaaggtgacggagccaacacccttgatctccacgccggaggcgtccccgaacttgacggagcctcggacgctggagtcgaactcggtgaagaactcccgtcggccggtcatgtgatgggtggcgccggtgtcgaggtaccacccatcagccttgtcattgctagagccgttgcagagggagacgagtaccttcggctcatcaaggtggaggaaagccgctgcggccggtgccactggaggtagctcgatgcttgcgtgagccaggagcagagccggctcttcctccacccgtgtgacgtgggcctggccacgtcgtggctgtcaacagtctttggcccaatggccaagcttgccacagttgcggcaggcgtcgtctcgtgtcggcttgtggttgccggtggcaacgccctgggcgcctctgcgggcgccaccctcggcacgtcttcgcgcccaccgtagctggacacctccccgcgccttgcgcggcttacggccgcctgtcggggaagatgactcccccttcctcccgtcaccctgagaggcctcccactgctcccgagtgagatggagcttcccgccgatggtgatgggccccgagagaggctgtggctcatcaccatcgacgaccttgaggcgacctaacgcctcctcgatcgatatcgtggagaggtccagcagagattcaatcgagcgagcgatctgcctgtacttctcagggacgcagcggaagagcttctcgacagctctctcctcgtcataggtgtcgtcgccgtactacaccattttctgcaagagagtgttgagatggagagcaaagtcatcaacatcctcacctggcttgaaggccaggttctcccactccttgcggagtgcctgcagtgtggacttgcgggcgcggtcgctgccgatgcgtgccgcagcgatggcgtcccaggcctccttggcagtccgcttctgggaaagcgagaactgcatctcgggcgggactgcaacgatgagggcatccagtgcccgccgatcctcgtcgtagtcgacgtcaccgtaccggactgcctcccacatgtgccgcacctagagcctcaccctcatcaccgcggcccactcgatgtagttggttttggtgagggtaggccacccaccgccgggaccaaagtccctgaccaccgtctggacgccgtggtgaccatggcgccggtcaggggagagagagccgtgctgcctgcgagggccgcgtgcgagctccgagctgccgccggcacgcctgcgcccgtctgggttcccgtcggcgggcgcgcggtcccttgggccgccgccgccgccgtggaggtgggctgctgcccaccgctctgctcgctcccgtgcccttcctcttgccagctcctcaagctccctgtcggcggtgatgtcgccggcgatggattccgttgatgctgctgcgcaaggtctcaacctctacctccgccgcacgtgccacatcttccgccgcctccgcctccgcctccaccctagctgctgccaactccgctgccgccagtctagccgccctcgctgctgctgcagcggtctgagccgttgctcgcctgcgctcttctgctgcggcgagctcggcgtcctgctgacgccgagtgctcgaggcgaccgaacgccgagaccgagcgtcggacatggcgcacctccggggggctgctgcgtggagagggggaagggaaaggggaaggaggagcaaccggtgctgttgctgctgctggctgagagctcaaccgagcttgggagggggtggaacaagagatgtttagcctacaggaaagtgtggctctgataccagatgttagaatttcaatggttactctcattgagaagaggatggcactcgagatggggcaattttctggttttcttcattcactaaacacaaaagccatacctacccgagggaggttagatacatatatatagccatagctggctgctagcctattgctgcaccctcctagtctaaaattcgaaatttgaatgggatgctgtcctagagggcatccaaactgaataaagcataaaggaggcataaaggagatgctaactgctgctgtcctactaaccgcagttgtcctagcaactgaaaaatatgctaaagggtagatgctgtcctgaaaaaggtgaaactacccaaaagcaaaaagaagaatcacgaccaaggaccacaaagacttatccaacagaaatgagttgcatgcctttttgtagtcctgaatgcataaatatcggaacataaaaaatgatctctcagaaaatgtttgaaataccacaacaaaaaaaaatgttcaaaagatgatttgaacattttgtcccaccttcagtaacattagagcagttcctttacggtagcaagctttcggccagtctggtcgcatcatcctgcaagcttcagcatccatcaaagccttcttcccctcacccaagtgaagccaacaaaggctcctatttgagaataaagatgcatctctaggattgagagcaatagcctacaagccgaaaatattcactttcaaatagtcaatctactgtccgtatttaatttaaagatataaaactaaaacaacggaagctatttcaaatgtccaaggtaagttagattggaaacagctgcattttaacatgaaagtgtaatggtgtaccgcagtataaatgttcatggcaccaagataatctttattcttgactgcttcacggccttggaattttcccatatcaagcgtagcttcacaaaaatcttcctcctgaaacatagagaaaaatcaaatgaaatataggttcattaccacaattatccgttgcccacactcagtactcagttgtgtcagttattatattttatccttgtgtaggtgcaagatgtcaatattatgtagttccatttccaacacaagaaaagtcatgtgattgttacaactcactgtttttatcgtcttacttatttataactccacagtacgtatcctctacaagccaagaagaacccactagtatacagtagcggtgagtcatgcagacattgggaactttcaagatgtttctaatgaacatatctagaaaaaacatactcaagtaaatttaaacaaaactagtgaactcctataaatttttcttttgccactataaatgtgtgaaattaattctcgcataaaaaaagttgcaattttcatttcaataattccacccatttagcttttgtcactactgtcagtcaagggttgaattgtgctaacaagggcataaaaagaagtttctgcccctaaatccaaaatttggttttgccaccagtggaggtgccaaaaattatggaagaaaatttctcaatgtcataattttaggaggctctaaaaactaatgttgaacgtgcaattaaagtccttatagcaacatgctgaatatcaaaaggtttgaagcattgttttaacaaagaaatactaaaatttgcttccatattattttcctaactttcaaaaaccctcaagaatcggccgaaggaggtgcgaaaggggattaactctttggtgacccaagtgacttggaagatttggaagcaccgcaacgacagtgtttttaatggcaccaaccctaggagttgcgacggtcttgcaagtgatagaaaatgagggtaatctttggtgtattgcaggagcttttgcccttcaaaagctccttagtggaacggcaaaccagggcagctaagctcttcgggtggtcttgggtagttgggtgtgcggatttcagtaggagggctcgggtcctcctactttgtaaaaaatatctttgtttttgttttttcttccccttaatgaaatgaaatgcagctctcctgcgttttcgagaaaaaaaaacctcaaaaaataccacacattctgctagactttttacaaaaagctatggcatcacaaccacttgtgacaacaggggtaaaggaggggcagagggagaccagctggcctcccccaaccatgcattttatgtttagtacctactaactaattaatcctttaattacatgattatgtcaagcagtttggtgtaggcattcaagcttccaacaccaactacgtttacatgcccaaacaaactagtagtatacgccttcgccttactgcatcctgagctgtgcatagattctaacgcaaagaaatgcaatgacgtttcaacacataccattgtccactgccaaatatccatttctttgtaaatattgttagatttgcctctccacttaaatttagaataataaaatctttaccattgtgtacttagcaaattataataataggcacgcgggaatattcctttgtatggtcaaaacatataaatatgtttatatgatttactatccatgtaaaaatgcttgaattttgcatgtattgtgatttttttatagatcattgtcacacaaataattagtttaagcacccccccccctccctagtccaaatcctactgggagacaaaaacaagcttggagaaagaaacatggtgatctttcacttagcttacagtagtggtataggagaaacaagagtggaattgggagtggcaaaagcgaaatgggcagaatgcttatggcagaaacagtaatgcgcacatttgtaggcgtaggaagagtaggacatggtatgttcatcaatgctaaattgctaacaacgaacatgactctagggttcttgtcttcatgatattatgtatttatcccatataggtcctgagttttgtaatatctgtcattgtctaactaaaaacatgaaggtccacatgtctgtaagacaacaagtgatatcccccttataattcttactaaaggggacccactagcaaagctttaaaagtcactaaagcattagaacaatgcttatggcagaaacagtaatgcgcacatttgtaggcgtaggaaactagtacaaggtgaaggcaaacttaggagtaggacacggtatgttcatcaatgctaaattgctaacaacgaacatgactctagggttcttgtcttcatgatattatgtatttatcccatataggtcctgagttttgtaatatctgtcattgtctaactaaaaacatggaggtccacatgtatgtaagacaacaagtgatatcccccttataattcttactaaaggggacccactagcaaagctttaaaagtcactaaagcattagaacaatacacctgaaggaccgaaaagcaagatgttttgagatcccatgccgaacagcgaattgccatttgctagattacaaaccacgtagaatgggaaattgaatatgcaaaaagtaggtacccccaagttcagtgagatcaatgtagacatcatacatatgactattattccttctctagaacagtcttttcttaaattgctatatccatcaataaaaatcaaagaagggtaactctgcataagatattgataatgcaaggaggtcaaaatatccaactaccatcgcacaaaaaaaatgcatatgcactactgacagctcagttacaggttctatataagttaaaatacataaatacacatttctttcaactaaatttgcttgctcataaattgtgcagtgtacaataccacagacgaatgtttatttgttgtttaggacattgacagtctccagtgcacatgtttgacaattacttttctaattatgcattcatgaaaatcattaaaaactacacggaagtaaatctaataatgtcatttttcacatatcaaatattgatgtttatacatatataagtgatttaggattcccttgttttactgcacacgctccaaaggagggagtaacatttgttaaataaggtgtctttaaaccagagagtttttgttatgttccttcaaaaataagtcattttcatttcgtttttttgaaaaaaaaaatcatggtctttcttacattccatgtttaggagatatactttgttgtgtagacgctgacttgtaagttaaaaagtgggacaagttagttagggggcttgatctaaggcagaataaacagcacatagaggtttgacatggagtttaagacccttgcagaaagatgattaccatgctaagtattcaccaaataacaatcagcatatttcttagccatgagcttaagttcttttcaggaagatggtttaactgctttcgggtcaggggcatgaattatagaaaccatagaaggggaaatctttcaccaagatagtagtaagcacacacgccactaacacacaatggagttttcagatcataccttcacctcaggtagtgactttacgtgattaatgattccatcaacagtccaatcagacacagactgaatacgagaagtgactggaaataggatctcaatagctttccgctcaccgcagcgtgcagcaacttctataggcatgtgtccaagctgttaagtgacaacacaatcaaacaagaaatcttacgtcaagcgagctttcctaaacaaatacagctgaaagtcttacgcataaatattgacatatgtcaggcattgatattgtaaaggtgtccgaggaaatgctgcttgctactatcagctcactggcagtgaatgcaatttcagttcaaaatttcagaaatttccaaaatatcggtaatttcggaccccactggcaagtcattatctcaaccaaaattttcagttttttcataaatttttgtgagtttggtcaaaacttattccatttcagtcaaattgtattaaaatttcaaataattttggtccaaaaagtgccgaaaaatccagaaatttcaggaatttcggtgctaccgaaatggccaaaattttcagcgaaatcgaaagtgaaacctctgctcgctggagaaaattatgcagatttatagagccaccaacagaatcattattcaacagaatcaacagatttatcgcaagcaaggtctcatcctagtatacatcttgcattattacaaaagtgaaatctaccatgaaacagacatcttgactaaaagttatctaaggatgatgattgtgcatctcacataacaatacaactaagccactaaggtctactagttgaggacaaccattacatgcaacaggttagaactctgatattggatcaatatgaccaatgtctgagcgtttggaatgtagttctcatacagtaagagaactacatgagcagcattgctacacgcttgcgctattacaaaggacccaaacctgcataattgcttgtatcaatgtatgatccgatgctgttcataaattggctgaaatattcaatgcatgcatggattgccatgtcaggctttcaaaataattatcaatatttagaaaattatgccaatacttcaagatgcgtaacttgagaattgtgattgacagatatagttaataaataaggggagtgtgtccattcatgacaatgattcagtttcccaaagtggaaagattaaaatgtcattttttgtttcttttttttgccgggccagcaaaaacaaagttggacaccaaggaagggcttggtgtaaatggttttaagaagaaagaagtaaatattcctggggagcgtgctcgacaagaatcgaattgaacccgggcccccaggtgcatgccagcaacccctgccactgcgcaatgaacgcatctcaaaatgagtcaagttctgtttctacgacaatgaatttacaatcctcaaggtagaagaacttacacagtcacgaacattagggtctgcaccagcctcaagtaagcactttatgatgtcagttaagcccttagaagcagcagttattaaaggtatttctttaccaattcctttcacatctgcgccagcctaacaaaagaagtttttatttccacttaagtccgaacaacatgatttttgtttatgcttctacagagtaatccactagcacttgatgtaagataaagaaggcatacctcaatcaggagcttcagacatttcagtgagccagactcgacagcaacaaaaagaggtgtataggcaccccaagataccttcttgtgctgttgaaagattaataaaagttcagaaactcagataaggacagactgcaggtggtcataaaaggtgggaaataaccatcaatagaaccaaccaccaatgcaaacatataggcacaaacagatatgatagttggcacaagcttcagtaagaaccaaagaaaaaataaatccaactcacacaacatcacaaaagcatttgagtttatgtattgttttatcatccgagttagtattttgcactaacagaagtctaggagcagatatgcaaactaggatcggttaggagtgcatgaatttaatagaaatttcacaccgaccagatcataattctaacataaatcctgctattatcccagttctcccttgtttggctgcagccttaccaactgctactgttcaagcccatatatgccacgatatccaagagtttatctagttacaataaggtccaaatttgaacaaactacctatctcttaggagatcatatattctggtaattattcaagcacacgttcctttcccgctagattcagttgtgctataggttgtactgggtgttgatttttcaatccagtgtttgggcctaagaatttatttataggcattctgaaaaacatttttgcctagctttacgttttaacaatagtgattttaagcaggtattcagttagggtaagctttactgaaaacgctgtttggctgaaattcactttatgttaaaactgattttgttgtgtaccttccattccatccaaatatatagggtatattttatcatgcacaaagacctaggaggcataaaaaaacaactagaatacacctaattattattttaagttctatattcaagccatgcatgtaagaaatacgaagtaaatttgactaattattaggagtctaaaggtacatgactcttattttgcgtatgaaataatcctaatactaatggccaagactattagaaagatgcacccaataatttgggacagaggtagtacctaacaaggtttcagtggtctgtggtcaggagcaactaaggttcttataaattttaacaaaatcagattttctaaaacactgtgtccaaataattcagtagacattgctataaaagcaagtagatgtcttcatttctaccatcttccttggtttaaataacgcttgaggtggatgactgaactagaagaaaattactgaaagaagtaccatccaacaagcaccaacgtgaagtttgatcatattagagagcaagttggggaaggaataaatgcagtgacacttacatctgcatggtggtctaataaaatcttcacaacagcatccctcccattataagcagcacagtgcagtgctgttccaccagtagtcaacgaatcaatataagctcctttagacagcaaaatttcaactattttgcactttcctgaataacagaacaggatataggataagtagagcaggaaacgcaaaagatgagaagacataagttcagatcatctaatacgggatcaacagttagaatttgcatacatgagaaaactaatgtttgttcatgttgactactaagctacaacatggaaaaacagaatggattactaattattccatggaaatttcaaaacacacaaggtttgtgagaagctttagcacggactgacaatataaaatgtgtggtgccctcaatttatccccaaactatggcatgtttgttacttcaatccctcttaacgcacagaaatgaacaagcaacagcaaaactttagaagctagcttacatgttgatataaacaaagcaagaaacacaggttataccttcaccagcagcaaaatggagagcagtaagtccatcgttgttgatcttttcagtatcagccccatgatcaagaagataccgcaccatgtcctcattcccacaattgatcgcaaatgtcaatgccgtttcacctgtcaattaaggacacaataaaccaaggatcctgacacattttttttgccaccaatttgagggaacaaccaaaagcagcgagatcaaaccggccgctaaatgcaaacttgaattgatactcagctatccacacaaaactaggcactcttgacatgaggcacgcacgcacctttgttgtcgacggcatcaacatccacgcggagctcctccacaagataatggcaaacgggcagcttctcacgggcggcggcgaggtgcagcgcgccgaggccgtcgctgtccctcacggccccaaccttgtcggcgaggcggccgtccccctcgtccagtgccctcacgttctctgcaagggacaagacaaaaaacaataaaaccaaaatcagcaccgaaacatctacaaaacggagatcggagaaggagtatcagtgccccccgcattggcgcgtactcctgaagatgcggaggtttccctcgaaggccgcatggaggaggacctcctcgaggagggccttcaccggcggttggcgggtgcgggggagggagcggccgcggcggcggggctaggcctggggcggttcggcggtgtggatcggggcgggcggcgggcggcggaggaggaggaggagggagggaagcgaggcggcgccatggtgggcgagtaggcgacgccgcggcggtgtagggttttgggggcgggaggtttgggattcggaaatgggtttgcggttgcagcgagaggtgtaggcgggaaagaaggaaggcgaagtggaggggggcgtggagcggagatttcgttcagattaggccgatgttagatgcaaagttttcctttaaaattctaactttttccatcacatcgtttcaaaaaacttccaacttttccatcacaccgttccaatttcaaccaaactttcaattttgacataaatatagatggagtatcagaatgtgtcctttaaatttgttgtcagttattaccttcgttccaaattaattgtaattctaaattatttagtataaattaaagtttaagaaaaaatactataatatcactttttaaatggtttatagataaaagcgaacgatagttgagcgtaaaataaggagaaatttagatgagaagtaattaatgggatcattagtattctattgggataattattgggagaatagcctatttggtccttcaacttttgctctgaggtcaatatggtcttttatattttagtttgttcaaacgggtgctcaaagtctacctttcagtctattatagtctactatggcccttggctgatcaatcgatgtagcaggcgatcgatgtacacacagtagttgctgcaagtttgcaacccttctatatcttgatggacctggatctgcatgcctgcataattgccatgaaagattgatatggttcacaaggagtatatacatttatgatgtatagattaaatatggatcaatgattaatggattattggtctgtaggacctgacaaatgatttgttgcttgaacatttgaacttgctggcttacgctataacaccttcatcaaaatatgtcagttttggatattttcgagtccaaccttaatttcaatatattgaagaaagaaaaaaaaagattcgatatgatcactactatgaaattttcaccagtgctctctccttcctaccctaaaaaaactccacaggcgtccattatagtgtgaggatgcagcgatgaatggtgcgtgtgctcctgtaatctatatctatacttctaataaattacaaccactggtggagaagggatttttactcccggtggagaaagggtttttactcccggttcgtaaccccctatagtcccggttttcgctatctttagtcccgggtgaaaaaaccgggagtaaaaatccatttttagtcctctttagtcccggttggactaaaaatactagatccggttgctctttattattttcttttcttcattgtttttaatatatattgatttcacctcatcctgtccccaaaatcccaaatcaatcattctcaaattgcctccaaatccacaatcgatcatctcaaatactcaaatacatcacaaaatctcaaaaaaaattacattacaacttctacaaaattatcaaatattcacatcacacacaaatcaaatacatcacacaactatcaaatccaatcaaatacatcacacaacaatctcagattctaaaaaaaaaaaaagaaaaaatccgccgcctcgccgcgcgccgccgccgcgccggccggccggcccgccgctagccgccgccgcgccagccggccggctcgccgcgccccgctgccctcgcaccggccgccgcctcaccgcacgctgcgccggccgggcctccgcgcccgaccaccctctccatgttagagaggagaaggagaggacaaggagaggaagataaggttgaggagagaagttaaaaggagaggaggagataaggttgaggagaggaggagagaggagttaaaggagagaaggagatacctcgatccaatcgcgcatgcctctccaatctccgcgtcgatcttttttcccggttggtaataaagatagatctttagtcccagttggtaacaccaaccgggagtaaagcgtatggcgatctttagtcccggttggtaacaccaaccggtactaaagattgaaaagtaccctggagctttcaaatcgggactaaagatgtttttagcctcggtttttaatacaaccgggactattgtgaaatctggtcgaccgaccaaagatggtttctccaccagtgaacccaccaacatgcaaccataccacattatcacccactagcaatgattacatattcaacctcgtacaagcatgcaacatcatctacaatctatttaattctacaaatcaacaagcatatccaatcatcacctctcaaatcattttcacattaggttttacaaatctatatattatttttatattatttaacatatacttatcaatatattttacattaaagcgccggtttgatttgtttgtttcatgataaatactaataagccctaacatttcattattttttttctttttactcctaactcgattgtaatgaaaagcgcggggaatcacctagtcccttctttctataaaggtaatgcccacttactgcaattaaggacctaaagctcaaacctcaggcttccacatcatcatcagttgtgaaccattggatcgatgcattatatcgcttctcaaccattggacgcagcatagtctagttggagtagagcccaatccatgtcacttacggtcgggattgcatggtagacactacaaaaacccataagtacaggtatggctttgaataatttgttttgcatgattattagtaaggaagtcataacccttttttagagtccatagccttcattcgggacgagcaaaggttaagtgtgggggaattgttgacggtctttaaatcataatatctgaccgtcaacacctgcatataatggaataaaatatgatattcaacatagtggtagggtttattactaaccatttccactagtgttggtatatatttggatgcaggtgataaactactaaagttaagaggaaatatacatgaaggaggataatcaaacttatatccaaacttatggagttttggacccaaaaccccaattaaatacctccaaatgggcccaaccaccatgccaatggactaaggcctcaaaatcagtgtccatgaggaaaaacggggccaacgaaactagccagggttttgctgaaccctgggttcggctgaaccctgacagaggccgttggcccaggcccaagtttagctcggtggcaaacctctccccaatgacggttatggctgttttcacttgtggaaaccgtcatcagctggacacttggcaagaggagaatgaagatgctctttggatgctatggatgatctccacactcccaagacacctctacctgtaaatagagctcatctccctcacttcacacacacaactttgagctgaattacaagaagctctatcgtatcttttgtacattagaaaatagatagagaatgaggggaagctctgaggagtgcccggaagtttggcgctctctccgacttctacctcaactgtagcttggaattttggaagagtaccagagctgtcgtgtacactgggttcagagaaacttctactaagtaagcattcaggatcatttgttatgttatttaattacttagtctaagtaagatagatttccatctttacgggttcattgtctagtattcgtactaagtgctatagtactaggactctagataaataaggaagttcatgcgcaagtattagagtagtaattaataacttaggcgtggtgtctaggttagatattaactttgtttgttgtatatcccacggatttatcagaggtagacggcaggtggtgacagtcctaaatcccgtcccagtaatcctccacgttcagatacatcatagagctatcaccgaaaccacgctagcagaccaacaggggtcgatgcccaagcaacaaataggaaattacttcttcaatcgtcttagcctgaggtagattacacacgttccctaagtttgctatccttttgcggtcaccaaagataaagtgctacaacggtatttcgtacatttgcagatttatctatagtcgtaaggaataccaacatgcggggagggcttgtgccgcgatgaggcgtcggcggtggcacatgaagtgattggtgtggaaaaccaggcagaggtggccatgccagtggcagtgtacctctacctcgacgttctgtgtagccggcggcgattaggttcatcggaatattattgtgtaataagtgcagaatataggattcctgtagattgaacacgaagtgccgtctactgatgttcatgtaaccattcctgtatttgtcgtgcgattattgtggatacaaagtttattataccaattgcttgattatactgaagtaactgctcgacgtccaacaaaatactcgtagattggaacctcacattcagtgataatagttgcgatcagtttcaagtaaaatttacaaagccgtgccagttgcaaaaggtttttaccaggttcttgttttccggactccagattgagttaattacatagtacaagttttgagtcttgaactgacatgtaattcttgaactgacaggtaattcaggcagcacgagatttcttcaatgatttgaaagcctccctgcacaataagattaagtcaatcactgtggtaaacaggcatcaaaaagaagagacatggtacatccaaagatgagatgattatctacaggttttaaaagattttatctgattaaattcatcaggaaaagtcagcacatgtatcatatgtatctacaggcttatttccaaagatttcacatggacagagataaataggttaccgtagaccattttcaatctccatattcgctgggtccaatttaagaccatcaagaaatgcatcgcaagccttatcagtcctgaaaacaaaataattgttgcatataaaaaacgattttgcctgacaaaaaatatcagcttggaagtaaaataaatattacatctcacctttaagaacatgtgagcagccccttccctgtagcaggcctttggccaatcgggacacaacatcctgcagaggtgagcatctgtcaaagctttcattccttcacccatcttaagccaagcaaatgctcctattcgagtacaagttccatcttcaggttcaagattcgtcgcctaacagaaggggaaaaaaagcatatcaacagttaccacaattgtcaattggtacttgaatccaatccaacagagtgatatgcccgttgaagtggttttataatagatgtacagtctggtgtgacatcagtacaactgaagttctccagcaaatcgacattggagcatagaaaatatatatcatattagattatcttcaatagcgaaacacaaagacaagttacaaaaaaccctatttgatattatataacaaagattgccaggaatgccaattgccaaatagagaaaaaatggtagcaacattgcattagctcattatcacaatgaggatggcttctttaacagacctctcaggaaactagcattataatttactccctccatcctacattatagtaacttattatggcattcagaagttgtccataaatatagtgacttttccacctactttctcatctcaagttcttaaccaattacaaccatctcgcatttgatttctccacctatcctcatctaaaccaatcaaaaccatttctcatatcaaccttaatttttgctaaaactcacagaaatgattatattttgggatagagggagtataacataaatgtaaaaagttcaagaaaattgaaaattaaagcattaaaggaatcaattaaaaacatgaattacactactatttgaattcttgctagagactgaaaactgtgcacgtcatcaaatcatgagttcacacactacacgagagtttggtaatagaatagggtgaaacacataccatagtgtagagttttgtggcagtaagatagtcctctctcttttatgccctacttccttctaacttcagatcagctggtcttattttgtacatggggtcatcctgaaattataaaaagaagcagatgatactagttgaggacaagcatgtgaaggctaatcagtatgttgatttttaggtcatcttacattccaagatccaatctttgtatattgtgaacaacaaacatagttgttcaacaagtatataggtttagtggtagaaaggttccactagcgtccattgtccactagattcatatttttgaacatacattcatattgtcttaatttgtagttattaatgctatcatttttggaatgacttgttgatgatggtgagctctacatccatccccttcactttacaagatatttgaatagatatatgcaaaaacaaggaatcttttgtgaaggattgcatcatctgaatatcgctatttaaatttgctttcatagacaagaagagattttttttaaaaaaaaaagaaggaaggggtaggggagggggagggaattttaaggaacaacgtatgggctgggtcacatgaatacatgatagtgagacaatggaatggaaaacaaaaatctcaaatccacctcaatggagtgcacatcccaaatcttcaccaattatattgatctgacaagttcactttggttgcacagtcatacttgaaaaaggcaaaaagagtgaataaaaggcaacacttaagtagctagtaattgaaacttcaagcagcataccgagagacaaagcatatggataattggttttatttttctataattctgtcacccctatcagcagagatttatggagattttgtatcaaccttgagtcagggtgatgtatcttaagaacttgtatacaaaaaaaatgctctagtgcaaattacccagtcttaatactaccaggcagtaacttatagtgaatctgccacccacccacctccacattgcttccttaggcaaaagtacataccaaactttccataatccatatgctattttttaattatttggccttataatcacaatataatatgaaaatgtccaagatggccagatgtattatagtatatacatgtagcatacgagtaaagtttacagtccctctaaaaatagtaataaattgttaaatcagcaagtgtaaacaccatccgtccttgaaaaaaatagacgggcatgtttgctgcaaaatcacattatactaaacagtactaggatatgtaggatctcattttattatccacagcaaatgcaaggtatttaggtagcaatattaaacattacaatgaagacctaattcatacctgcacatttttgtttacataagtaattatcccatcaacactccaatcatacacagatggaatacgagaagttactggaagtaggatctccacatctttccgtctgttctgaaatccaataatccaataagtccatgtacgacttgaaaagaaaatatcttttttctgaaaagctataagatttatatcatagaacaataaaacattacagcacatggaatacatacaaaaaaaaagactcccaagaataagcaaacaaattgcaatcaaattgacattataatctacaccatgccaccaagtttcaaccatatcataatagacaacatgccacctgtgaggctgatgatggaacttttgatatattagtgcagcattattttatagtttagcttagagattgcctacatgagatcaactgtttggtaaaaacgatcatgtgaagttcctctgagaactatcaattatatgtaaaaaaagatgttgcatgcataaattcagcttgacaatataaaccatctaataaatgtgtattacaatctgaaaccaatctaattataattgctcagttgtgtacctagaaattatatgcatgtgcacatccatggaacaagtaggatagtttgaattcagacataaaattaacaaattattcttaaatcacaacagaaaaactcgattagcgagtttctttaagatggaaaaaagaatgtgacgaacaacgtattgtattaaaaaaactcaccagataactgtcaatgggacattggacatatatagtagtatgagatcacaaaatagagcatcatataaaagtatgaatatcaacaatataatttccatgagtgaaagcaaccatccaatagagtaaagaaaatgcagtgcagaaaggaaaagagagttacttcatcaggcacattaggatcagcaccagcctcgagtaagcacttatagaaatcagttaagccttcagttgcagcagcaattaagggggtaaaagtaccaacacccttaatatcagcaccagcctaacaaaaaaatattgcagataccttccctaaataagcatgtcataatttatacaatataaaaattaaatatccaccaaagtattgcctcctaaagaggagttcaataatgtgatttttcagtttgcatgtaaaaaacacagtatatcaccttaatcagaagcttcacacatttcaatgagcgaaccataagcgctgcgatgaggggtgtataaaatgtggaaaataccttattacactacaagataattaagaaaaatcagtatgcagacatgacatatgttagcagatgttttgtagacaaagaaagaggtataaacagaatatcaaataaaaccatgttgccaaaatcataaataaatttacaaatatctatatatcctatatagttggcaccaaaaacttgacatgcattgagccacatcatctagaaaataatagcctttgaatcctctcatgttttgatctcaaccatccatttgtcatgcatttacaatatatgtaatgcaaaagcacataaaccatatgcacactgttggtgagctaacattaatcagcacagtaaggatttacttttttttactgaacataaagattagagtaaaatacactggtgatccttgaaaaccgcatctaggtacgagggtgttatctaggtccataaacttgaaaaccgcatctttagacccataaacttgctgaatgtaccaatgccggtccaaaatatgacgtgtgccacaggcatgctaacattgcaccttcaccaatgccacaccgactaacaagtaggacctacccacaaaatttctacaccaaggctcttggtccagttttttttgggtcagactgctggtccgacctggattttgtaactgtggtggcaagtcaagaaatgtttcacactcaggtaaccccaccaaagttgctcttcctctgtctccattattagggtgaaatccatcatcctgtcttccaacatctcgattcctttatgtaaacaatcactattaagcaagttttcattcaacagatggaggacaggggcgctgtaaaaattaacaaagacctcaatgctatctaccagtttagtacctcatctaatctcaatgaccttgacattgcactatgaacagtttttctttcgatttatccgtatttacaattaaatcattttaattttaataattattttgtttgggtttgaatatactcatttcatccaaacgacccgctctttttcatggttgttcttttcagggtaaaaagtggctcatttatgatatttgacagcaataaacattttctgccagatcaaataatgaatctttcaaatgtaagcagcaaggaagggaagaaaatcatataagaaagctttacatctgcatggtggtccaataaaatcttcatacagccatcatgacttttcacggctgcaatatgcagtggcgtcccacagtcagaagatgaatcaacatcagctcctttcactagtaagacctttaatatctcgcaatttcctgaattagaaatattgtgtatacaataggtcactattatgcattattgtaaatgtgtagcagtgcagaatatacagcaagctatttgtcactccaacagttttactggtgaaatatagttaattttattacctatactagagaccataccttttcatctaatgtccagtttacatcttgttctaattgatgtcctttataccaggagaataacaaatgggctcgtgctcacatattttgacaactaatgatgagagccaagtacccaacagttataatactgatagaagcagctatgtccccatatttgtaatagtcactcatcaactatctcctcaatgcagtaatagtattagttaagttgtaaagtatattattgtttacaggctccagcaaactaatagtagttactctccaatgacatgcatatattccctgccaaactagtaaaatgtagtatgtcacaataaaatttgtgtcaaagatttagagttgacaacaatgaaagtcagttagcaggcaacttgtagctgccacctcatccatgtaatagttgctccttgattacacatatatagctgccatttgagagaaaaaaaagaactccactatgccgtctctaacatacgtagtacatatcattatgctcatcgtatagaacacaattgtgtaaaagaaatgctaacaaggtacttgtgaaggatatgcgatcattttaaaaaaaacagaggatatcaacttcaatggacctacattctctagtctatcccaattcttgtattccgttttctttggcttgctataacaaattagcgacaaggggaaaagggattaggaaaggaaatgatgacatcacatgctaaaagaagaagatggagaaatacaaaagggccacaaaagattagaagttagaactagagtgctaaaacactagtggcagtgacattagttgcataataattagcataaccattgataacaatattacatgctttggagttaaggggggtatatcgtacttttgcgatagttgaggggggctaaaattggacttaggctgcattcgttcccctgggttgggaacccaaccctccagcacggaaaacggagcggtccattagcgtgtgattaattaagtatttgctttttttttcaaaaattgatcaatatgatttttttaagcaactttcgtatagaaactttttacaaaaaaacgcaccatttagcagtttgaaaagcgtgcgcgcggaaaacgagggaaaggggttgggaaccctgactatagaacacagactttcgcaactttcattatttgcaggtctccaaactagaaacaaataatatataaaaaaaaaagtggtgtgcaactatgcatgcataaaataagggaccatatgcattgaaagggaccttgttcaactgctaaatggagaggagcacgcccttgttcattgggcttatcaggatttgcaccatgatcaagaagataactcacagtatacacaatcccacccagaactgcataaatcagtggcgtagcacctattggaatcattgaaaaaaaaacaaatcagggtttcttgtaacaaacaaaagagatcaatccacactgatcacttatcaacaaacaaaagataggaggtttgttgataacgtgataaatcaagtgcattctgttgatatcagtttgataagtaccaaaggaacaaaattaaaataataaggcgctgtttggtattggggttgacttatgataatcatgtttggtagcttttagatattttggtgttcagcaaacttattttcttttaaacagtgttacaaacaattatattattgcatcctgaaaatccggaacaattgagaaagaaacatgacaattaaataactatatcatctaaccataattaatctataaaaaaaaggcataacaaacataagtttttccacggcaacttaaaaaaataagcacaatgatgcaacaactaagcctaaataaaaagaactagcacaaagaacaaccagatatggcctacaatatatccagattacgcaatacagtagaagatgtttaaaagattattcaccagaatcaagaaattacttgctcaatttaagcaaaaaccatttcagaaattgtttgctcaaattaattaccttacccagttccgttatgactataacagtacaagtaactctctcggatgaattaaacacatcaaagtaacgtacatccaacccagcctcccccccccaaaaaaaaaaaaaaaaaccaaaactcacccaccgtgcgggtgcggctccagtgttgcaaagttaccgcatcccacaataccacaaatgccatagatctcaaatttctcaacctctaaaaaaaaatctgggaagtcgcttttgctaaaacgaagagattacctgactcgttggcggcgttgatgtccacctggagttcctcgaccaggtacacgcacatcgcggtcctcccgttgcgggcggcttggtgcagagccccagcgccgcggtccttcacggcctccaccgcctccttgaggcgtccttccccgccgtccagcctactagcaatccctgtcgaatcaatcccaaccccccaaatttccccaacccaaaatcagctcccaatcgcgagcaaccaaaacacgggaagtagaaggcagtggaggatcggggcccgtggagcgcgccgatcaatccgagccgcacgcactcttgaagaggcggaggtcaccgtcggcggccgcatggaggagcagccgctgcgtcgcgcctgggcctgcagggaggaggaggaggaacaattagcacgcggttaggtgaagctttgggggctagggtttaggggtgctcactgcacgcgtgaggcggcgccatggcagtgggggttttgggaggcgggaaggcaaaaccggggatcacgctagtggaattgtagaaatggagaggaagagacgaggaacccgtggcagacagaaacagatccactttgtgcagtctgcgcccacattttagtggcacaactgcagactgcacataaagttagaggatctgtggctcacatgttagtgacataactgcaaactgtataaagtcaggggttctgtctcctctagggagtgtacaactttagaggagtctcctcctcacgcagacgagtgtacaggacgataaaatggggattattttcgctaaaacgttatctggttaaagggttttctttgttaaaatgtcacttttacggttttgacaaaattacacttaggcttcgctcgattcttcaaactggagaaaaaattgtactacacgcgaaacatttaattaattgttataagttttaaaaattggatttatttgctttttaaaaacaactactacatagatttttttaaaaaagaatacatcatttaacagtttgacaaatgtgataataattcttttaaaagaaggcattatttaatagtttaaaaaacgtgctaatgaaaaacgagaaaactgaagtttggagttgaagaatacaaccgggccttagcctcctcttcttccatcgattcgtaagagtgtctccaacagcctcttcaaatcggactctccaaaaacctatattgccagctctgcaattgatttgtcaagccaaacacattccttgctccaacagcctctccatctaaactctccattagggcaatagcagtgcgccacgcgatttttctgattcgtttgccggctagatgaagaaccccattagccacatactccacagtgcaagttacctacctacgaactacagagggtcccactagtttctttttcactttatttccggtctctctcctctcctctcctccttttcccatctctctcctctcctcattttcttcgtcgacactggagagcgcgagcggcagggcggcgtcggcggcggggtggcgacggcggcaagatccaccctcccccctctcctcccccaaagcggcggcgacggcagcgacggcggcggggcgacgagatccactcccctctcctctcccgaagcggcggcgatggcagcaagatccactcctctcccgaagcggcggcgagggcgccgaggcggccaccctctcctcctccgaaggaggtggcgactggagggagggtcgacgagctccccagcagcggcatggagtgggggctgccgtcgcgttgagctcctcagcggcggtcgatgctgcctcctccggcaagatcccttcccattcccctcttcctcgttgtctctcctccggtcctctctctcccttccctgtggcgtgtgcatgacaaaatgtgggcccaaatctgtaattttttatgaggaactcatggcaagatttggctccccgttcctcgggaggcttcgcaaaaatccaacgtggaggagaatctctgacctggcctacctaggctgaatgccccgtcactacatcataaatggccttacgagcctatgacactgggacccacacatcagcctctaaatacacctttctttctcctctttctctcctcttcctcttctctcgacactctacaacgcagaggctggcgacggcggcggtggctctctacgacgacctcagcaacggcgacctcgatgatgacacgtggagcggaggcggagggggccgaggtcacaagcgcggagctagatgacggcgacggcggacgcagccggggcggaggcggcggcggcggacgcggccggggtcggaggcggggcaacgacaacacctcgccgctgcactcccttcatgccctcgacgccggcggccggcgagtaggaggccatggcaacgctcgccgtcgtgccgccccaccgccgcatccttcgctagcaaccttttcaggagtcagtacgcgggtagtgcaaggtgagagaaaggctatccgcgtgggatccacgaatagcaaatctgtttgggctagtcaagtttggctattgaggggaggaatttagccagtcatttgacttagccattctagtagagatgctgttggctgttggagtgagatattttgctaaaatggccaaaatttaatttagagagtctactggagagtggctgcgtttgagcaacattgatcacggtggcaccctcactacatgatgcgctggccccatccccatatgtagagctagctttggacctagaccagttgcgcgaccacataggccagggggccatcatacccaaccctcagttccctcagccccctctctcgcaagcgatgcctagctagcccaatacttctgcttcttggcggtctcgattggcaggaggaattcagggaggtagcgaggcgcacgtcgcgtcccctcaatgacgcatcgtttcaattaaaaaaagggagaatctagttgttttgcttccttcctcggcagtcaactctagttcagtccggcagcagcaccaccgcagcaggaggacgctcacgtcgggacgcctgaaaattaggttataggttaggcattctctcttcttatgttgttaattcttatttgcatctattagtttaaaaatgggacgataatttgtttaatttacttcccaatttcagttgttagaatgttcctatgaagtatgaagcatagcatcagcggaaagacttttttttttcaaaactgaaattactgaaaaaaatatttgagttcaattatgtcataggaaattaaatgtccgaaaaagttcttttccatcagacattgaatatttgtggtcttctatttaagatatttatgctactttatttctgtggttcttttagttatcatttacactatcaacattgtttatagagaataaaatgacatattgcaatttataactacttgatttattatttatcatgttagcaatatttatttctgccactttagaagatacattattataaaacttgttttttactttataatgttagtaatatttattatccagaaattttcacttctaagcacatgcaaccttctaattccaaatatgagcaggtaatggatggaattctatttttaatcaagaagcccacatgtgtgtgcagtggtcttctatcggacttaatgtcaaacgaaatataacaaactaatggctactgatcattggacaaatcactagctcgtagcgacttgtgctactgattattggacaaatcactagctcgtagcgacttgtttaggtctaattgattgtttgtcgtcagaaaagaaaatcttattaccatttgcaattggttggatcaaccattacgagatatggcaccgtgccgtcatgccattagtctcgagctttcttcgtctttttttttcttaatccatatttgacttggatgttgttttcattttgaaaattggaactgtagcggccggttgaaatataatccatctgcttggatcatcaaaatcataatattatgtgtgctaacaaatcttgatttgtttcacataaaagctgcatcaacaaagggtaattgtaatactagcgaaacatgttaatggatcatttgctttgtgcctgctagctagtttgattagaaacagaattcaggacaatacatgctcacatttggaattatgaggttgcatgttcttagattaaaaaaaatcggcgttagttctaattttcacaggttcttataattgcaggaaacgtgtattcggcctcctatatgcgatatctacgatactcaagggccaaggcacgttcgattggtatctgagccaattaatgaactttcagctgcatgccctctgagcttgtctcctgcatcctccttgcgtgaggccgtgacggagggagacgatcccatgttgatagcattcccgtaatttcaatcctgttgcaacgcaaaggtatgacatttaaaaagggttaatcggatctatgtcattataaatttgctgattttaaaaaaaaattaatactattcgtgaaaactaggtggatgccattatactcttttaaaattagaaccatgccattccatcatattttctatcaacaccttggtcagcacaacaggccacgagcaacgaccataccgcttacctatcagtgctctcggcttgccactgccgcaccggcgacctcgtgctaagctcgcactatcgccattaccactgtcgacgagtgatactcgcggaccggatgtatagagtattggggtacgttggaacgagggtctacgtagtacgacgtcaagcagacaaaaaacaaggattatattggttcaggccccttgtcagttaatagccctagtccagtttatatggaattgatgacgatgagaacatattacaaagagagtagtcgaaacagatggtaccgatgagatcgtagtcgagggattcgacgagatctcccggcgacttggctccgtgtacttcggcttcgtaaactttggtgggggtgctggcgattgaattggataccctgaacccctcccagggggtccctttgataccgtggatcatcttgccccccaagaaaggtttgaggatattggacctgttacggtataacagaaactcaatcctttccgagtaggactttggaaatcacttgactcgtatagatattttctataatttgtaatggtttccacacgacatttacaggaacaatccatatacacgaaggtataccttatcagtatattccataagtcatagaataggaggtgtctgtaaccctgatagtagcccctgacttcaactcaaatgaattcatgttgtcgttcgcaacttctcttatcaacggcttgtcgtactcactagaccattctcggcatggaccgagaagataaggagttattgacaacactaacggaagtctgtctggctaatcatgaatttgaattgaagtctgaacaattgcccttaacgggcctcaggatttttcggcggcaatctctctccttcctcgaaattcgaaatgttgggtagtgcgcttatttaaagggattttaggatccatttcaagtccgtttgccaaaaagttctccaaccttccaacagtctcggacctttcgtctccccagattccctagacttttccgtcttgctccggcgatcttccttcaatggcggaccttggtatttctacctccgatctggcaacactggcgaagctctccactgacagagcccctcctccagagcaagacatggccagagaagaaggaggtactgccccctcccctgccctaggtcgtatggtagtagtagaagatttcattcgtagtggctttctactgccgccgttggaattccttttgctagtcttgaacttctacggcctttctctcttgcacctcaaccccaactccatcgctttcttgagcatttttacccatctgtgcgaggcctacatcagggtagtgcccttcttggatctttttcgcttttcctatgaactccggtggatggaagctggcaaagtatcgggatgttgcgggtttcgcctgcgcgatggcatgaaggcgagatacatatctctccagtgccatacatcccagtccaagtggcggtccaggtggttttacctcgagctagaagaactcgatccggttcttgtcgtgcccgagaaccaacctgttcgacaagactgctggacttccaaacctcccatgaccccttcacttgaagcctttgcgaactttatcggagatttgcgagaacaggggctaaccgggtatgaagtcattcaagacctcgtcgcccgacgcatccagccactgcaagcccgtgcccatcccgcgtttgattatgagggagcatctgacgtgacgcggatatcatcgcggggtactcgttctcgcgtcacaatccctcccgtttctggtgataacatttttaagctctatgcctgacctttcttggcctcatccttgtgttgcagctctctgcgtggatgtcgtgacgcagcgggtcaaggacgttctgatcagtcctgcatccacggccgaggaggtgccgaccctgttctgtgacaagccagcgccgacaaggcagccgccatcaacatgcgtgagaacaaaatattttctgcacttcctcccaaggatgaaccaaaatgacctcaagctctgtaggtcctaccgctgacggacatcatcggccctcttgttgatcaccaggcttccgcctccctcaaggaggaagtcgtggaagaggttgttgtcgcttcctctgcccctatcatcgcggagggaagtggaaccaagaggaaaacctaggccaggacaagcggcgctgccggatctcggcagaagtccagcggttccgaggtaagactttagcatccccattttcccagttcccgaacttttcgctgtcctgatcaggacaccagcggcctccctcctcctccgaagcggaggtctgtgaagaagatcgccggcaagtaagtagagttgtttgattccttctgttgtcacgcctatgagttcgttgacgacgttttctgatatcggcaggaaaccctcggcgatctctgcccagagcagcgacgaggtggcgaatagcgggactactgttgtcgcctttcctcgcgcgaagtctgcgcctgctgccgccgagtctgctgggcccgctatcgcgactagactgcggtgccgccgtcagggccacaggactggtccaacatgatggccgagtgtcgccgcctcttcgagaacgcttttcgggtggtcggggctcagatggactacctaacggcccgcgcggtgtcgtcggatgggagggtggcgcaactggatacggaactcgaagtcgctcgcgacgacctccagaagatgaaggagatcatggctggcaacgagatgcagcatcttggggtggagaagaagatgaacgaccttcaagaccacatcttctccatccgcaaccagctccagaagagtttcaccagcctgcaccagctagccttggagtgcggcgtgaagtcttccatccctgcgcaccccgacgagacctctctgacatcggcgttgggcgagctggcgacgaagatggaggccatcccgtcgaagcatgccgccaaggtttcggaggagatctccaacgggatccacaccggggtttgtcatgtcctcgcttgtgtgaagctggctctccccaacgtcgatcttaaagagatcttgtcaaagggggccgccgatgcacacacgaggacgtgatggccgatgtggcggatctcggggagactgccctcccccttttcgaggagtattttttttcttttctttgtgcttcttctgtgtagatacttttgtgatgtccctggtggaacgatccccttctcttaatgttctcaacttgttaattagcatgttttccttatcatagagatgttgattccgaggacgtccaccaaggcggacgtcccgatgtcgatgcgacgaactaaccttcgttgggtggaatgcctttgtcggacgtcggcgcgtctaagggcgcatatgccgcacttggctctccaggttttgacatggcagcgctcctctgtgaaaattcaggtgggatatcttaggattttagctcccgaacttttacttgttatggagcaaagttccttgaacccttgccttttgtagatctcaagggcgcactcgccgagcgagatcgacaagttctataatggaggacgaagtttgaggtggcagagctcgagcggtccgtggtggtcgtgaagaaagatcaagccgttgaagcgctccgaggacgcgaggtctggttgaactcgtatctgaagagctgttgcagtgctatgtcggagatttggtgacaactcaaggtcgaacgcgcagagaccaaggagacgacagccgagtatctatcctggatgaggggtgcgtgtgtccagctagaggatatcggacggcggattgaaactgcctgaaggaggagtgccgccacgctagccgttatgccgggggccacgtactcgcctgcatccgagaccagcgtcctcatatgaaccttgggtttcttaatgaggggttcggccgttctcggttatcaatgagtgaagtcgaccatctggctcgttctcttgctcccctcgccgagaaagtctttttgtcaatggattggcagtggccttcttggtaggtgttattccctgcagaaaaaacgtctagaggaacatttgtaatataagtgttaagttttttttgtaaagagaacggaaatctacctacttagagtttgaacagtgtatgagatatgcgagcattgctcgttgttcaggctatttttgcctgttgtcgagttgggtaccctccctagcccccacccttgtcctcggagaaatttgttgtcggagaagaaggcttgatgacccgaaacttgcctatttgaaaacgcgattacctagcccccagccgtgaggttggaaaagtcaatttccggttacacagcttggttaatgcgccgtcattgagcactcttacatgaccaggtctgacagggtcgtttgactcttagtgtccgacaagaccttatctgctctgggcgtccccagccgaaattctcgtaggtttctcggaggcttgtcggactggcgtaaagggacattaggttcgacttcaattgtaggtgttgtcgtggtaagggatctctgggtggaacactgtctcatgaagaattcaaaaggaaaatacctttcttgaactttatttgatattggtgagatacattggttctatacatagaatttacgtagttgatcaatgttccaggagttggataactcgcagccctcgccatctgtaatcttgaacgcgcttggtcgtaagacttgcaccaccatgtatggtccttcccatttgggcgagagcttattccgccctgcttggttttgaacttgttggaggacgtagccactgatggcaagtgtacgagctctgatgtgtttctcgtgatatcggcgtagggcctgttggtacgcggctgctcggatggcaactcgttcacgatgttcttcgagtagattcacgtcatcgcttcgtctttcatcatgttcctcgtcgaagtatttctgtactcgtgtgctctgatgtcgcagctccatggggaccatggcttctgatccgtacatgaggaaaaaaggtgtttccttgttggatgttgtcagcgtggttcgtacggcccatagtacagacgggagttcttctacccattttgtgtcgtaggccatgagcgtatcgtacacgcgggttttgatatcccttgaagtactataaggaggaaaagcattgattttttaataatctgctctgcttgcttgattgcccttgtgagtgactttagcttcaaatgaaaaaaaaaatccatgccaacacttggttctgttgattatgaaaaaatcgaagggcatgtgtgctttaaggagatgtttgatagacagaactattttcaaccttttaccatctttacttgtgctgcattaagtagttgtccctaagtttatgggttttaacttcctatgttgcagatttgtggatactgaaaaaaccatttatcaactagtcggaattattcaacacataggaaccccaagagggggtcatgattttgcatatgtgagagttagctggcaaaatggagggtcaacagaagcaaagtgtgggagctccaagtcctggttttatgcaagtgttgaagatattagagaagcttgcttagatgaggttcttagaatcgtagttgtgaggtttatatgttttttaatgaaagggtggggactaaaactctttaatatcgtgttttgataataatagacatgtttctttcgatgcaatacatgctgatgttctctattgtttccagtgttcgaccaatgtttctcaatattctgccaactccactggtgaggtatctcagctcactgatatcagcatgcagccccgaacaggagctcctgttattaaatcgccgcctcctccacctcaagttcaaattaaacggtgggggttccagagggatctgaatcgtagtggcggatctaacatgggacatgggggttcagttgaacccccaaactttttgggaaccatcaaattgttattagtattttctaaggttaaggtagatttcttgaacaaaagctagggttaatacaaatttgagaaaaaagtgtgtgggtagagagagatgggaaagaggatgtgcgtaacgaatggggcggaagcagcaggacggaggacggtgccctgaccactcgagagatggatggggatcggcggcaggcaaactgacaaggagggtcaggataactcacgcacaacagaggccaactatagtgcgagggtaatttagtaattgcgtctagcactcaatgcacccggattgcacatcccatccctaccctacccaaatggtgaaaatctgaaaaatggagataatatccattagtcataatcctattttccaaaggaagctcttggggctggacctttgagacaatggatttttattttaatttttatagggttgagatggtggataaatattaggtatgtttaggcattgcccgattaggaatgactcaccgaacgggtcgtgtcatgtcgatccacgtgctgaggatggagcctaggcactacccagtgagatgtcaggtcgtgtcgtatcggccttgcacgattagggtacgtgggttgtgtggacacccattaacccaaatttgatatataccaagaaaaaaaatatgaacagagtcggtttgatcctcctggcctacattgacgagcgcccaccatcacttcctctgccctgagcccttggcttcctcgatttttccgttctcgtttcctcatggctcctgctcaaatggtagttgttcgataggcgactgttcaccagtcagttgccatggtgccgcacaggcaagggtgcgtcatgccattcttgacccatgtcgtgcactcgtgctggttcactacatgcactttggcgtgtttgcacgctaggccaggtagcaacccaagcacgagatggctagaccggtcgtgcctgcgtgacccacagccaaatggccgatgctgttcctaggccatgaactatacatgcgggctcgagcgaagagggaaagacccaacccatttgataacctatagaaggatttggcaaactcatagccattcttatgcttatatgaatgagatcaattaagacacctcagtcgcacttaattaacttgattagtgtatatgttcccttctttgattacactccagccaagaccaaaaaaaataataataacacccctttccccaaaataacatgcaagcacaatataatctagaaaacatatccatagcgttgtctgagacaatttatttcaatgtccagaatgaggataaaccgatcgcatggagatatacacatgaaaaatattttctcactaaatcaacactaattaagagagttaattatgagaattaatctcaactggtagaaacaaagggatatggtagacattatttcaactacaccaagtggttttagcaatgactctaggggatccacaccacacaaggagtcggagtcgatgctgagcagatagggaaatatcctcaaggaaggcacccaacatgacgattttctcgtccttcttaggctcaatcacacagggatacatggccacctgggaatatgagatattgatacattttctaacatttttcattgatttttcccttttacttatatgttatttaaactaatatttttaattaaatagataattagattttaacccaaaacaaacatattatcaaaatatatcaaatgttaattttaatgaaactaatttggtgttgtacatgttaatatttttttaatataaacttggtcaaagttaagtaaatttgactaggaaaaaagtgcaaatggcttataatatgaaacgaagggattagtaattatcatgacatattattactattagttagtagtaatttttacatgagttactagtaattactgtgacatcaagttgcttaactaatttttagaatttaggagatatttgtttccttaacataatctagaattctcttaattaattatatatgaagataatatttaatgctacatataatcatataaatatctataatttatatggataaaatataataatttagagagtgacatttgttatgaatctaatgaccatagtgcactataaatattactcaagtgagttgtgatttttattatatatgattgcttgtattacttctttttatataacttaaaattaactagcatagggacagtgtgttgcaagaaaacaaattgagtttctaatttattgaatcaattaataagcacttatttagtccaagtaatactatgattttccttattgaacaagtagtgattttgaaattttaggagaagcaataataaaacgggagattactcattgaaatatggtgtaatagtatggacttaagacccataggttagtggtaagggtttggtgggaatggacactgccactaatagcattttaagtagtatatattatatgggtacaatatttatttgctatttttacatttcaatacatttttatttaaattagttattattagagaaatttaaattatgaaaaccaaaataacttacaatacatagaaaaatgatgtaaataacagagaaactaatgttaatttctacaaatattttacaaatagtacaaaataaaatattaaaaatatataacattatacaatataatatattatattattttataaactaactagtttaccaaaccccagttaaaaaatcctatatacatctctactgaatcggaataagccgagacaataaaatgacataagtcacgatggcatgcaagcgcccgacgcctgatggcgacgcttgctccgctaccgctgctgtggcgctgtcgccgtgcaataagccacggtggctgttcatgagcatcttcaactataagaggatggagacgctcggggcgggcacgtacatcgtcgtgtacagggctcgcgaccgccgcaccggcgagacggtggcggtcaagtgggtgcgctcacggtgtggccgcgaccacggctagctggccgacgtcgaacgcgactgcctcgccgcgtgccggggccacccgtacgtcgtgcagcttagggacgtcgccgctaacccgtccaaccgggacatgttccttgtcaaagagttcgtcggcgcccgcagcctccgcgacctcatcgccggccatgcccgtcgtcgtcccttctccgaaggcgagacccgcgcactgatgcggcagctccgcgccggcgtcaggacaatgcatgccgccggcatagcccaccgcgacatcaagccacgcaacatcctcatcggcccgggcggtgcgctcaagatatgtgacttcgggatggcaaccacggcggcgccgccctacgagggattcatggtcggcacgctccactacaacacaccggagcagctcgctggaaagggccagtacaacgcccaggccgtggacatgtgggcgctgggcgaggtactcgccggactgctggccttctacgacgacgagcggatgatggcggaggcggcgctagagcaccggtggttcatggaggaggccgactcccccaccgtcctggagggcctcgccggcttacttcatgatagaagatttagagtagaagcaattgtaaggcgtcgtcaagatcgaacaccattgcatgtcatgaaccgattcttgtgctataatgttggttcttctgtaagagtaggacaccattagcattgtagtaatatgtgtaatagtgatttataagtaaagtatttgttggaaagaatcaacgccattgttgcttaatttctttaaatatcaatgtaagcttctcgacgtggctgctcctttagttccctaattcttaagccaaaactatatgatggtgtcatgttcttgtttgaaacgggacatccttagttcctattacaacgatattaagtagtgttatgtgtgccctatcatacggtcaccaagatatttttagtttttattttttacttttgggactgtcctaatatcaattgataccaactgagtattatgtatcagttcttaccgactaagtattagctaataccgtgagagtattagttgttatcggcgtgatatcagatcttatactggtgaggtatcatgtttggtagtgagtaattatctcgttgcaaaacgagataccatgcaataacaaccccctaattcttaacgttttggataaaattagaatcaaaatgcattgtgctatcgtcattctttttttagaatgtccatgtaaaatagctcctcttcgcagctagagaggaaaaaaaacagagaagatgcacactattaattgcattgagtgtcaagattataattttacacaccagagtcaaattaacaaaagaaaattagtttagttcgtaaccaaataatataaatccatcacaagtactggccgaaattgtatgatcacagaacaatccaaaccagaaaatttctcccctgcaaatacttcaacatgacaaatcagaccagcaactcagcaaggggaatcaatttggtaatatgttccttaattcactgtaaatgttatgtgatctagtgatgggaaacattgtaagatatctaatgatatggacactaatgaatctgaacacgtatataaaacatatatattgatgaacgataaatttaggtgaaaccaaaaaaatcttacagtattaaacagaaaacagagagtaacgcaaaactttgcattcattttactacatacaagtgaccacttctgtacatgatagatagaattagagttttgtgttacagatgtacaactacagacaacatacccggtgggtgggggtgttacatgtacatatacagtgtacaccatacaagcatgaaggaaaaagtataattgctatgaattcaatcgacagtaagattttccagcatgacacacatatttacaaatgaaaaataatttataaataaaagttttatataatatgttcttaactatctaaaagcaaagcctaaaaaataaactacgagattaaaaaccccaaaatcaacttaaaagtaagattgaaaatttaaaatttttgcttataagcataagcgaattcatgcattcagccgagcggaattctatttagcaaataaaatatctgttccatctgttttatatattaaatcactttaggtttgtcccaaaccaataaaatttaagttgatcaagttttttaaaatatatagcaaaatctccaatataaaataaatatactataaaaatatatttaatagtggatttaattaaactaatttgatgttttggtctttgtagataaatataccactcgtccacaatagtatatttgtgtgtcacgccatttagaaagaatggtataaaattagaaatcctcaaatttttttggcataagtatagaacaatcacccgaggagtgaagcctgcgagatggtggtagtgtggccgtctcggcagccaaaccgggtttaatcacgcagaaaccggatgaaccggtttttgtttgagccggtgaacgcccccgctttgacccaattccctcgccaagttagtcagagagcaaactgtggccgtccatcgaagagtcggagatcacgtgatgatcgtccgatgcccaccggttccccaataaatccaccgccatggcgccaaccaaatcacacactcgccggcaaccggtgctacggcccggccgtggacatgtgggcgctgggatgcataatgggcgagctcctcaccggtgcgccactgttcggaggcgacatgatagaggaggagcttctcgccgacctgtcggacaaccttggggacccgctcagggagctgttcgaggatgtcctgctggagctttcaccggcgaatctgtccgggctgctgtcctttgatcctgagaagaggctgacggcggcggaagcaatggagcaccggtggttcgcccaagttaccaagagagcagagtttactggctttgacttagactctcaatttggagacacttcaagtagagcgttttcagcaagcaatcaatgagaaatacttaaagaaatacttcccaagtgtttggcaagatgcttaggaggtactatggacggtaattggattatcgccctaagacaaaaaacatgttctatgcttttagattcaaattgtacataaaaaggcaagggggatatgtgtttacacccaaatttagcacctaggagtaaaataggaaaaattgccaaagtttgtaagtctaccgttttcctctatggggccggtcagaccgtcgggtgagggccggtcagacctgcggtgtgtggccagtctgaccggccgagttcgagtccgggtctgtttttgtcggatcttgggtttccttgctcgggaagacatgtttcgggttttttttggattctaccctgagttagacgtagaggagggcctgtagaaggccagaccaaccactatataagggggtaaggccggttcattgtaataatcaatctacaatcaatcaatcgaatcatttttcatattgcttttagttttctcttagtttgtccatctttgtcgatttgcgctgtaaatcgtccgccgctgctgcgagagtgcaacacctttttgtaggtttgtgtcgatgcgaaaaacacacactggcctgggatatctgcttagttccagtgcaggtccaaaggttggtgagatgcgggcgtgccagtcagtttgatcctgtaactgacaagatatataaacagtagatcaaacagccgatcaactgacaagccgatgtagtagttccagccgatagcaatagagttttcagctatcggctatatgtaaaatgtatataatgatatgaaggcaatcggctgatgataatataatatagcaatataatccagtataaaccaatcggctaacaatatgatagaataagcacttatccgaaggttaaagtatacatcggctgaaggttcgatgtcataaaatccaaaacgattagataaatcaatgaaacctttatcgcaatcggctaaatccaatacgtatgcaatccttgtaagccgatgcaacatccagataactcatcggctaaaatcccgatggaacccttattggcaatcaaaaagcaggctagagattatggttctaagcatgacttagtagatcaaacttaactgatgcagcactaagtataaaaaaaaacataatatctagacaatcgagccgttgactgagttttcagggtggtagatgtctaagctaatctaatctagcaacgcgatttagccgatatcggcagaaaccctaaaacgagaagcagtcgatagagctaaatcgatatgctaagactagattaacaaagacataagataaataggttagcaaatataccatccaaaccacagcaatccaagaggtcgaatgtactgatgcagccttgaacgacgtcgatgtaaacgatacaattgcctgggccgacggaacgcaggacgtacccttcgccggagatcgaaagccgatgcagccccgcgtcaggtgccaggttcaatcggatgataagtaaaaacctcggtaaagagggtggcgatgcgccgagagtagttgtattgatcgatagattgattcattacaatgaccccgggtgtacatatttatacccgtgggttgatacaagttcttgtcggacaagaaagaaactttcctaaagataaaaggaaaacataaagtcctaatcggataataaacacactttcctaaagataaaatgaaactaacaaactattcctaattaatagataaactgccttgctgcatcctttttggactcggactcttctggataaattccttttagttgatccaactccatcgaaaacacggttgctggcgatttgacgactcccatcggctgattccataactctgaagccgatactgactctaagccgatgatgactttgggcttaccaaatttcgtcgttaacagtttgtcctgaaaaccttccgttttgcccacgagacgggtacttatctagaatcggttccgctagccggtttagttatcaaaacccatcttgatttagcttttactagattgaggtggttagtgactctaggatcaccgcaagacgtttagatgctgcaatcgtgcttgtcaacttgtcataaaaggttgccaacaagtctgtgtacatattaacagatagtctgtgtcctatactgaaatggtttactggtaatcaggcagcaggcaacgcaacgccaagaagggaaggggtcaggttcaaggcgtctgaataattcccaaacgcctcccatgccagagtcgcctcacttgttatatatttgaacaaacattacttacataatgagtttcgtgttgcggggcagcagctggtttcgcgaccactgtcgtgccacagtggacgtgtgcggcaggtgaagcacctcgccctcttgctgaaacggggacgactggtgcgacacgaagaacggagcggcgtccggttttttttgtccaggagcgacgcgatgcagcggtgtgcaagcttgcatctcgtgcagcgcggcgcacaggcggcactcggctagccgtcggctcgacagcggctagggtttcctcccgtggctcggccggttgcggcgagtttgcaccacgacggtgggtgcggaaggcggcgacgaactcgacggcgacggaggcaactcgggctccagcggtcggctgcggcgcaagggacgacgacggccggctccgaaggtggatggaattgagctgagtgccacgtcagttgaaaccgccgtccaaatcaccgaggagctttacgtgtcatgtttactatagcgaacttatcccttcccttgttgtatccgtcctttgttgtccctctctagggtttccacttccttcctgctcggattcccatggacggcccgtcgggttggttcctgaaggtccctccgccgctccacaccgtggatccgccgggctcccctcctcctgcctccatcctcctcgagccatacggctacttcagcgaccgcaccaaccacaccaccgccaggggcctcaccaggggcggcaagaacatcgtcttcaccttctggacggccaccccgccgcgcgcctccttcttcaccctccattcccccgacgacaccaagtgctccgccttcgccgacgcgcccgacgccgtctgctccgaccaccacctcctcctgctccgcatccccatctgccttgaggccacccaaatctacgccatcaacaaccactacttcgtctaccacgcaggcggcgacggcgagcagcggctcacgccggtccccacgcccccgggcctcaccttcgccttccccaacagtgaggtcgtccttctgcgccgccgccgcccccgcgaagccttcttcctcgccgcgctccatcgccccaccctctgtcgccagtacacccacgagcagttcgatctccacctgtacagctccgagacgggggaatggagcaccaagctgatggtgagcgtcgacgccgatgatgatgatgattcaaccagcttcagattttcctacgctagcaaggcgattgttgtgggaggggagctcggaaccgtgggctgggtcgatctctggcatggcatcctcgtctgcgacatcctcctcgacaaccctcgcctccgcttcatcccactgccgccgccgctggtgcccaggcaactcaagggagacccgatgtttcatcgcaacatcgttgttcttgaagggtacatcaagttctttgaaatgtacaaccacaccaccggatctgcctctgctcaaggttgggtggctgcaacgaagaagatgaagatttcgagcattgcatctgggaacagcagcagcagcagctgggaggacgactgcgctatcaaattctccgagatcccagtggagagcctcacatttgcccagatgctgcggctgcagcctaatctgaagcagggtacgggtacaacgaggctaactttgaagagactccacgctggttatcctgcgctgagcttgcacgacagtgatgttgtctacatcatgcacacacctgatcccgacgaggaggacaaggcgttggtgattgctgttgatatgaggaacaaggctctaaagggtgtggctgattttggctttggaaggcctgtgggctacggtttcacctaccttcaaactgggatctccaagcatctcagcaattgttcttcttcctccaggtaatttttcttttgagttctctagtttgaaccaagcgcttacaaactaaacttactgaccttgatcgactagcagcagaagaatattatgcatgtgggcaatgctaaaaagtcttacattgtaaaacggagcaagtatttgcaactagtattctttagagctgtttgatttattgtttcccaattgacctgtttgtttctagatgcttaatatatattgtacttgcattgatacatcatattatcatttatgtttccatccacaaaactagcacttctagctcccctgccactacgtctacattttgtaatttctttcttttgatgatgtataaataaatgcttcctatcaacagctacaagatcacagactgaatgtcttgacttcaatgcattaatattattcctatcatgttcagtaaaaccctttcccctggagtttctgcttataatgcgctgcacctgaaagatcatatagtttagttttatgttcatgaatcatgactacttcctccctttcaaattagtttgctgttctaggtttgtatgaagtcaggtatttttaatctttgaccaccagattcactataagaatactttcatatatatagtccacatgtcattaaactacaaggatctaacaattaatggttaaagatagacatgtttgacttgggacaaacctaaaacggcaagtaatttgaaacggagggagtaacaaatatctactacgcctgtcccaaaatataacttctagagttcaaaatttgtcccaaatatagcaactcagtacttataaaatgtgactttgaccattaaactaccccttctaccattttgcttcattatagccccatctaattttggcctacacggctacacctcactcgtcctgaggtggaaatcaagtcttttaccccctctccttaatagctgttccataggctaaaacttgatatattttgggaaagagggtagttcatatctcatagccaggattctacagctttctgtgtttgcaccttgcacaccatgttgtgttaatgtgcaccactaaaataacgtttatttctagtggtacacatgcctacttcgtattttttgctttgctctttagagtttattatttttcatcagaactaatatgatttccatcaaacatgacatgtgcaatatcgatacactaattgcctaaccttgtattttcaccccagctaaagggccaaatgatcccaatagtttgcttatttttgaggggataatgttacacgcccttgctgatcagttgtttcatagccatgatttatccatgcgttccattgcatgccatatggtgtaaaagtttgggacatattattgccaaaaaaaatgtgtaccaatgaagcgatgttttcttctggtacttgaacatgatttgctgtttgggtttcattctttttaactggaagccaaaattatttccataacacatacaataagaaaaaatataagctagttcgcctagcctagcagttgctcgccctggctaaggatccaaacaatcccatgttgcatcctttaggagggaatataagagttgacgaccgtccctaaaaaatgccaatacatcggccctgtttgagatagctgaaattgatggactgatagataatctgatttttgtgatagctatttgagggtataaaggaatgaattaactactacaaatttgaaaagttgcagaaaagtattccaagaaaatttaattttaaaaacttttgcacaaaacgcaccgccgtttaggagcttgggaagcatgcaagtgaaaatccagaatcaaaacaaaaagaaactcaacagttggacaaagagattgtacgaacaaaaatagttatgttaatgtaatttgcactctctttgtatagtttttcttttctatttataatgaaaattaaccgtgggggcttcccccactgtttcccgataaaaaaaatagtgatgttaattctgctgtcatagagtataggaaagttgtttgtccaccacacgtgtttatcattagaattctatttgagggccttttactttatgatcaacgtaattgatataataaacttctgcatattttaactaagatgcactcttgtaccagggatggaattttgggagcaggcgagaaagaagttccaggtgagggtgttgcaaccgcagcctgactcttaaggtttgaagcagggcatggccgtcaagcagagtggtggtacttattattatagcaagttgaaacaatgcccttcacacctcacccgtgatggctagtgttgcattatcgatggacttgtattaccttacttcttttgcattatgtgaactatggtgctctggactatgtggtacggtagccatgtgacgtctcatatatcttggtaaaaaaaacaaaaggtacaaactgtgcatttacaattaatctcagtgtccataattagtatatggatgtcaggggaatatatgacttggacaagatcagcaccaacttaaatgggggagagaagaacctgtgattagcaagctgacgatgagggtagagccagcagcagatcagatcaagagcacaaagcacatgatcatgagtactggatcgtcattagcacgaagtaggcaggcactatactcgagtcattaccagtagcaaggtaatttccacactcccagatcccaagcagtagatacacgcacatatatgtacagataatttacttgtttgtcatcacttgtcacaccctgccaccaccaataccccaaaaatgtcaacatgaataaaatgggttagaaatgggcaatgaaatggtgaaggaaacaaatcttcggagcatgtaaaatacactagcagcactattatgagaagcagggtaggtaataataaacctaagaatggtactttactttagtagttgaacttgaaactacttatagcggtagaaagttaaaatggtactacctccgtttcaagttaaaggcgttttgactttagttaaagtcaaactactttaagtttgactaaatttatagaaaaaaaatatttttaactcaagacaaattttattatgaaaatatatacaattattgatttaacgaaactattcatattataaatattattatatttgtctataaacttagtcaaactaatagtttgactttaaccaaagttataatatcttgtagctgaaacggagggagtagtctggaggatttatgcacaagaggaaaaatttatactgcacagaggttcagcataacatatcccgacacccgactgtatgctcccaataaaccttgacagagtacgctaaaatgaaccttgatgaggtctaggagctgtgggttggtaaccaaattaattttcttcctaaaacatatcactagcacatatcattagataatcataatgtggagtaaatggcatagcaattagggactcatggactgccagagttgtgcatgctgctcttcttgtgaactgtgaacagctatcacaacatggcatgctgcaagcgtttgaattccagggcatctgatcaggcagcaatatacttcagggctccaacaagttgtatatatttatattggtagatatggagaccgaagataaacagtatttacatcaggatcataatcacagtggagggagatttacggattttgatgattcatcagggcgtactaacaataaaacttacatagaccgctatcttttctctaaggcatcggaaacatatgcaggtatcctaggaaccagtaaactgtaaaaggtagcaactcgcttctttaactttagacaagtatactccttaaaaagctccccatctattttttttcgataatgttaatccagaggttccatatcaacgctgcctgacatcttcaaggattgcaaagcctccctgcacatttccagttactgagatgagtatgttttataaagggccatttcagtgtagctgaagggactaaggttaccttaggctgtgtttagatccaaagtttggatccaaacttcagtcattttctatcacatcaacctatcatacacacacaacttttcagtcacatcatctctaatttcaaccaaaattcatactttgcgctgaactaaacacagccttaatgcattattcatcttaacattctctggctccaacttgagaccatcaagaaatgagctgcatgcatttttgtaatcctgaatgcataaagattagaacatacgaaacgatctgttacaaaatcttcaaaagatgatcagagcatttatgtcccaccttcagtaacattagagcagctccttgacggtagcaggcttctggccagtttggttgcatcatcctgcaagcttcagcatctatcaaagccttctccccctcacccaatttcagccaacaaaggctcctatttgagaacaaagatgcatctctagtattgagagcaatagcctacaaccagacaagcaattagcacaaacagttaaggttgcatgccctaccacagttgaccagtgacatctcaatacattatttatacccggttgaagattcaatttcacattcaatctactgtctgtatttttagtttaaagatataaaataatgtgtgatatttcaaatatcaaaggaaaaattatatcggaaatagatgcatcttaatatgaagctgtaataatgtaccttggtataaatgtgcatggcaccacgataatctttattcttgactgcttcacggccttgaaattttcccatatcaagcatagcttcgcaaaactcttcatcctgaaacattgagaaaaatcaaatgaaatataaggctcattaccacacattatagcccacatgctcagtactcagttgcatcaattattatatttttatctttgagccaatgaaagatgtaaatatatttttatatagtttcatgaagcagttgccaaatcaacgcagggaatcatgtgattgttacacctcactatttttaccgtcatactactgctaatttacagttctacagtactgatgttgccatatcatgttctctacagcatgccaagaagcacccactagtatatagtagcagtgagtcatgtagaccttggaactttcaagatatttcttatgaacgtatttagaaaaagcatactcaagcaaatttaagacaaaccagtgaactcctatattttttgctttttccattataaatgtgtgcaatattaattgtcataagaaattgcatttttactttcaacagttccaaatgtctgtaagacaacaagtgatccccctctaataattcttactagtggcacccactagcaatattttaagtcactaaagctttagaataatgtacctaaaagaccgaaaagcgagatgttttaagatcccatgtccaatggccaattggcatttgctagatcacaaaccacataggatgggaaattgaacatgaaatatgtagataatccccaagttcaatgaggatgggaaattgaacatgaaaaatgtagataccccccaagttcaatgagataaatgttagacatgtatgctctctagaacagtctcttatcgtaaattgctacatccatcaattcaaaacaacttgatgatgcaaggaggtcacaacatccaactaccatactgctaaatgcttgcatataatatgccatgaaaaattatgccgtatgcattactgacaactgagttgcaagttttatataaattgcgtagtgtacaataccatagacgaatgtcaagaactaccacagttctttttttgtttgttgttttgggcatctataatctaaaaaaagtcatttcctttcttttctttttcttcgaattcaagttctttctttgatctcatattaggatataagttgatttctagagtttaaaacttgtcccaaaataaattgatttctagcctcttgcctaccctcggttcacaaattgagaaattttataccttcaataccccttacttacccatccaccaatactaccttcctattaagctgggaaactttagtcttttcccctcaccactaaagttttctcaggacacgagggtttcatttattttgggagagggactatactagatatactcagatgtagaagttgatttaaaagttcgaaagtacagaatattgaaatcgatttgacaagttggtcagtgagcttgatccaagcaagaaagaacagcacacagagaacacaataaactggtttacagggagtttagcccttacagaaagatgactatcatgctaagtattcacctaataacaatcaaaataatttcttagccacttaagatgtttttcaggaagaaggtttgaatgcttaaaggtcaggggcgtgaatatagaaatcatagaagggaaaaatctatctccaagatagtactacaagtcaacatgcacgccagtaacacaatgaagttctcagatcaaaccttcacatcaggcagtgactttgcataattaatgattccatcaacagtccaatcgtgcacacacggaatacgagaagtgacaggaaatagggtctcaacatctttccgcgcaccacaaagtgcggcaacttctataggcaagtgtccatactgtcaacaacacaatgaaacaaaaaatcttatgccaagataaatacagctggaagaagttcctaagatattgtaaaggtgtctgaggaaatgctgcttgctatgatcggctcactagagataattatgcagatttatagagccaccaacagagcaattgatgtagagcaaggcctcatcccagtatacaaattgtattatttcaaaaagagcaatttaacatgaaataaacttcttgaagacgttacctaacaatgaagatgattgtgcatctctgtcacacccagaaattcacaaaccagaatttctaagctgaatgtgcattaaatccctgtccaggaccagccagggtacacaaacgacaattgttgacatacagatccacgtcttacaaaaatagaaaagattacaaatgcagcggaaaagataacagcgggctaaaccgggaagcttgacttcagcagcggggcgactccactctacaggcatcccttgacggcagcgacgaaaccaacttcgtcaggacagctcccactaggaagatcttcagctctggtgtggaggaaaagagagcaagactgagtactacccactgtactcagcaagtcataccggaagaacagatatgatgcaggatatatccaaaggaggctaagggttcatttgcataaagcaagcgtttaaaaacagtagttgaaaacagtaaaacaattgtagtaattaagtagtattaaccaatcactgtccaacgctacaccacgttgcaacaggcccaaccaaccacctgaactacaccagttcattaagctagactaggggtgagactaattacgatgaatctggttgatcgcccataaccgcgggcacggctatttgaatagttttactctggccagaggtgtacaactgtccccacaagacacgattccacacatgtcgccatgccctgaagtatcaccatgatactgcaaagggggaaatcgtgacaagaccctccgcataaccttcccctaaccatccacaccacgctaaggtttcaccccacccctcaaaaggcagtgggcggtcccctcttgcgctgcggtgaatccggcagctagacaaccggacaccccggccgacccaactccatcacgcccaccctcgccaccggtgcctaggaaagggtcgagctatacttcagatcaagcagttacccactcccacttgtggtaagcacggtaagtctcccagggtttcccgtgaaccggtccttaattgctatgggtgcgaccagcaaaaccatacaccaacagcccaccattcaatgtattttaattaactaacaccattgcggtggcaccaatccaaaactatgctaatagccaaagtctatgtaataatgtgatccccatttgtgtactagttgaacaaagcatggctaagcatttcctaaaccaacatctaatcattatgatacccaagttatcaatggcatatggtaaacaatatatggctgagtaataggacccatcccacatgacattgaaaaagaatgcaacatttaatagaaatgcaggatatttgtaaatagggtacaatatgatcaaatgtaatacatgacttgccttgctctcgcactgataagaccacatcaacgtcttcgagataccgcggatcgacgaaacggccgaaaactacgcgacaaacaaagcacacaagcaaaacatgctataagactactaaaacagggaacaaaatcatttttaatggattctttgcatttttatgaatttactgatacttgaatggacttaaacggagctcggatgaattacttatgaattttagaagataaactgtgtttttactaataaagaaaaagtccttaattatttatttcgcaataaatccccagggctgacgtcaacaaggggaggggacgccgacatgtgggccccgcacgtcagcggctcaagagagagggagggggcgccggcatgcgagccccatgggtcagcggcacaaggcggcaggtccaccgtggaccgggaccacgcgggtggtctaccgccggtccacgggaccgacggtccagatcggccgggaggccgatcggacggcacggcggcggctaggcacggctcggcttcaaaaccggccggccgaccatggggagcggctgcggcgagcggtcgccggcgacggcaagcggcggcacgggaggcggcgcggacggcgcgaaaggtggcggcgctcatgggagggacgaaaggaagaaggagaggggatccctcaccgaggcgatgacggcgaccggcgcgggaagagacgagcggcaacggcggttcggtgaacggtggacggggtcgggcacaacctgggaaaggcgatgactgggttaggagaagggaaggatgaccacggcgactagaacggccggccagagttgggcggaaatggagagctcaccggcgtgcgagggaggcagcgctctggcgacgtttagcggcaagcgagtggcggccgaggtagctctcgcggcggcggagctaacggcggcggcggcttggcgcggcggaggccctagcggcgacagcgcgtggctggagatggcggcaacggcagaggagctcaggtgcacgcgcgagggcggtagaaggcgtgggagaggacggcgaaatgggggaaacgagagagggagctcgggtgacggtttttatgggcaagggaggggcggacgtggccggggaggtggccgaaaccgccggcgacgtggggtggagagagagagagagtggggtgggattcgatagcgcgcgcacgaggcgggagcgacggggcgtgggcggcgtcgtggggaggacgcgggaatggcgcggtgtgggcgcgggaggagcagaggaggtggagcggcaacggcggttgccggcgtgggcgcacagctggaggttggggacgacccgacaggtggggcccacctgtcggcgtcccgaagggaggaggagggggcgcgggccggcccaagaaggagatgggcgcgcgcaggcggtggggtggactgggccgacggcccaagaagaggaaaaaggaggaaaaagaaaaagaaaaggaagaaaggatttttcctgggatttaaaattgcactttggtgatttttaattggttaaaattatttccaaggctctgaaaattccactaaaaatcctgttaatatattgtgacacgtggaactcaagaaaaatcccacaatgccaattccaattattaattgcatttattaattaaggaattagctctaggttaaatcaaaccaatttcttcggacaatttatttaacaaatttttaaagcaaggaaaagagggaaacttccgggcgtgacaatctcacataacaacacaacaacggtctaccagttggggacaaccattacatgcaacaggttataactctgatattggatcaacatgaccaatgcccgagccattccacattgtagtcctcatacagtaagaaaactacatgagtagcactgctacacacttgcactattacaaaggacccaaacctgcataattcctttgtgtcgatcatgtcatttttgtattgtatgatccaatccagttcataaattggctgaaattttcaatatatgcacggattgccaatactaactattccctgaaaatgtagaacacgaggtttttgagaaactattgcacagactgataaaataaaatgcgtgttgtcctaaatttatccccagaccatggcatgtttgtttttcgcgaacgcgcaaaagaactgcacgtcaatatattagaagaaagtagagtttagttacacgacggcatgtttgttacgtcaatccctcttgattaatcagtagaaaacaacttcagaagcgtgcacgcaagatataaataaacatagattatacaccttcgccagaagcaaaatggagaacagtaagtccatcgttgttgagcttttcagtatcagctccatgatcaagaagataccgcaccatgtccgcattcccggaattgatcgcaaatgtcaaggccgtttcacctgtcaaccaacgataccagaaaccgagaaaagcctgacgcaattgttttgccaccaatttgagcgcacgatcaaccagagtagagcaatgcagctacactcagctatcaacataaaaactaggaatctcgaagagagaagcgcacgtcacacacctctgtcctcgacggcgtcaatatccacacgaagctcctcgagcaggtacccgcaaacgggcaggctcccccggccggcggcgaggtgcagcgcgccgacgccgttgccgtccctcacggcccccaccttgtcgccgaggcggcggccgtccccctcgtccagcgccctcgccatctctgcaagggacaccccggcccgaacccaaatcagcgacgagacaccgacgaacgaagcgggagatcgatcggagaggggagctccagtcggagttggcgcgtactcctgacgaggcggaggttgccgtcgaaggccgcctggaggaggacctcctccagcgagccgggggcgagggcggcggcgccggcggctgcggctggggggctgggcctgggctccggcggtgtggatcgcggcgggaggcgcgcggcggaggaggagggagggaagcgaggcggcgccatggcgggcggcggggttggagagggaggcggcggtggtggcggtggtggtggtgtagggttttggtttgcggggttggggattcggatatgggcaagttgtggcgggaggcgtacgcgggaaggaaggagggaaggagccaagcaaggaagcgaggcggacggaacggcgtgtgccgtgtgcgagtgtagcggagattgcgcgaaattttcttactttttggacttttttttactttttaattttactagaaaaatgtctgggtaaatacttttttcagtgatatactaagagctaagtaataaattgaaatattaggatcactatttatacactataattgaaaaagttaataaaaatcttaacattgggatcactatagattaaaattaaaaaaataatgaaaatatttcatgggtttttggccgaaagccttccttccttttctggctaggctagtccgctctctctccctccatttagcctgcttctcttcgaccctaccatcttcaacttcccgaatatactaccatcttcaacctcccgaagataatcctgtgcaaaattggtcgagggtttttatccactcgatcttctctttctgttttcctcaagattagagcgtaaaactcgggattaaaatgaccgggaagattatcgtcatcatcggcaattgtagaacagagattaaatccggcaattaaaaccgaataaaagggaaaatcatggagatttttgcaatcaaattggaggagaaaacacatgatcgatatggcggcggcgcggcgctagggttcacttcgggaggcgtgcgacgaacagatgggtcagatgggattataaaactggataagaaaaacaaaaagcgcacgggagaaaaaaccggcgacaaaaaagattgaggcgcgcggtgaatagatcggattaataaaagggaaaaaaaaccaaaagccttagcgtgtgcgcataaaatactcttttgcgtgcaaagaaaaaagggaaaaaataccagtgccaaaaaaacaccaaacggactttttttttattgggagattttttttccctttttctacatgagtcggataagagatgtttttttcttttttcttactgacaacgacgaaagcttttttttaatcactcgttaagtcggactttcttttctttatttatttaccttttttgagtcggacctttttttctttcttttttacataagacaggaatttcttgtagtagagatatagattaaaaccgaaacataaaactaaaaccgtttgaaacacggatgacgtaccaaagttctggcaaaaacgccttgaacttttataataggtaaagattaataaacctttctaaaattatttctgaaaactaaacctcttgaccagcgtatcagtattattttaccacgcgatccacgacggcatagtaagagactggcatggcagaataacagtaacactagtaatactaagaccgttatttgttgtggagtgagacaacgatgaagagatcattgcgacgaagccctttatgattgccaccagtgaccgccgtggaggatccaccacggaagcaccccgtgagcatgaggcgttgtggagttggggatggttgttgtgagccattgctgatcgtggagtgggatacgaggagcgaagcgtggtcattgttgtcgtggagggacatggaggcaaggtcgtagtagttgcaggggaacacggagacgtgtggagtcaaaaagctttcgatctggacttttatttgatgcagataatggcaatctcggtgccatgtggatgacgttgagggcgtattgaactcggcgtacatgatggacgataaaaaggcaaaataagcaccatgaattttctttaacagttttattttggtagaaattaatagattttttgcttcgaaacattgccgcacatataaaaatcacagttccctttatattatcactttccccagaaactctagttatatctaaaaagggctaaaaaaatacaaagccaagccaagccgaggaagaacctgagtcaagcagagcctactcaacaagctttgtgtcacgtcccaaaacgaccctaaaatatatccttaaaattatgcctataacaattaaaatcaaattaaatgcctccaaaaattaaaatgtgtaaagttaaaagtcaaataaggcttggaggatttttgtatatttcctaaaagcctaaaatgtgtaaataaattttagtggaattttcagagcacaaataataattatgaaggaataaacaaagttaaaaaggttttataaaaaaaaccactctctctctctgggccgaattctgcccatcccccctctctcttccccacggcccactcggcccctccccgcgtgcgccccgctgacgggcaggcccgcccgccaccctcgctaacgggtggggcccacccgtcatcaccctcctcccgccgctccctccgcccgcgcctagcgccgccgccgccgccaaatctaccgcccccggccgttcccgcgtgcaattaagaggggggaaatgtttcccgtgattccctctctctttccccccattttcccctccccctcccgcattcaaacggccggatttgctcccacgccggtttccttcccctccggccgccctctctctccctcgaccctatttaaaccctccccgcacctcccttctccgttttcgccgtttgccgccccttctccccgtcgaattcgcgcctgcgccgtcgtcccctctctccgccgtcgtcgtcgacctccggcgggcctagccgctcgccgggaccatcccccgcctcagcgtcgcctcttccggcttcgccgcaccgccgccgaccccgtccaccgcctcgccgagctcgcccaccgctggaacgccgccgtccccgtcgacccgagccgcaccaccgtctccctctgctccaaccgcctcctctgtcgccgccgtcgcccggggtgagccgtggaccgccgcctcctttcccccatcccttcccctctctcggccgccgctccgccgcgcctatggccgccaccgacgaccataggggcgcgggcgccgcctcccgccggccgcgccgacgtggccgcctccaggcgtgccgtgtggccgccgcgtggggcccggccgtcagccgcccgtgccctcgggtgcggctgatgcgtggggcccacggcgccgggcggtgtgagcccgggtgcacctggtccaccgtggaccgtgaggctactgcgtgggccccactcccgtggacccggtccgcgcgccccctctcctcggctgacgcaataaactcatttttaattaaaatttaaatgaagaaattcgtaaatattcatttaaagagcatataaacttcaaatggccataacttggtcgtttgaactcggaattggaccgttcaagtctctaatttttccttatggagtcaagaacccatttttgtgctttgtttctgcttattatatggagtttattagagtaaaagcctttttcctttctgttggtcgtgtagacgctgtaacttcggaagatccgctctacgtggaggttgaagccgatgtttgggaaagcgagcaaggcaagtcacatctcctttgaatatattgttgccccatgctttaaaattattttattttgaattaatgcattatcgctttatttaaattcccgcgttatcactgttttacttagccatgcctattaacctctgttatgaccttattattattgttattgttgttattaccttgctcaccctagagtaaccaaaacctcactggtgtgtactatattatggtcacactagtaccaattttaggtagatgcttcgccatttaaattagacaaactttaggtggttttataattctagactttgggagttctcatatcatttgtaccttatggaatggttggcttatgtggaactggacacacaccttctcctctgttcaaaaccccaaaaatggttttaggcttggctcgaggtgcatggttttgatagtagcacctcggccactataaggactggtcttcgagcctctgttgcaaagcactaccgtacttccacatgtctagtgggtaagatatagtttgtggctcagtctggtcataggcaatagtacacggatagggatggacgaagtcggggctcgatggacatctctaggacaaatgaaggctacacgagctgcggcccgatagtcgagatgtcatggcacagggccggtgtcctgctgctacgggctcacccttggttacctgtctcgggattccgaccgtagccaaggttgggtcggtactcttgtttatggctaggatgggttgggaactatgtcatgtcttccgtccgtatgccatggtggtatgtggcgcgtggttacacgtgagaaagacgtgtattgtgggtaaagatgtacacctctgatcaaagtataatctattcgaatagccgcgcgctcgtttatagacaagcctagcaatgtacccaagttagtggtttatttcttaaaacttgcttaaacaactaaaaggtgatatggttggcctgggttggcttgggacgagctgggacctgggttgggacctgggtctggttgccagttcggtctgaatcatcataagccttgggttaaggcaggttcacgtgggttcacggccttgattaataacactgtgtagctttaggatcacctttacaaaatggccctgagcaactaaatgtcttctaaatgttgtttactgcaaatcctaacccctatgttataacccccttgtactccgttgcatttattctgtatttgtgggtgtgtcttgttgagtatggtagttgtactcaatcttgctcaattttttcccaacccagaagaggagttcctggaggatgaaggctttggtgtctagctcgtgcctgccgtcaagcgcctgtggtcgtcgccctagtcttacgttgtttttcgtttatcttcgagtgtgctgggccttcgtcgcacatgtaataaattaactatttacgtttccgcttgttaaactctgaattgtatcaacttttggtgtacgttgcctcctgggacaaggaataatacacgcacgtatggaatgcctgttgggttaattctggtcatgacactttgtaccgtagcatgccatgcgagcccgaactagatccactttccaaatatggagccaaacccccggcctataaatttagacctaatcctagcaaagatttaaatcatctatattactccctttgactcaaaataagatacagttacttatgctgtctatttttggaagggttaagattgatgtaagaaatggttgttgttggtttaaatgataaagtatgtgagaaaagtaaataagagatggttgtgattaattgaaacatggaaatagattgagaagagataaatctaaatgctaaaaatagctacatattttgagacggacgatggattgaaaaagaaatctcaatatgacatgtcagctcgaaatgactataccaacggaaacatgagctaaatttgggtgcagtaaaagatactagccgtccatggtttggaaaatcaaaacaaaatccttattcataatattttttacagtacaagtacatacgcccacagtacatgtacgcccacatatatgaacacacacactatctacatgagcacatccaaaaaactggaacagcgtatcttgagtttgtcgaagtcaacacggatgcctcgttgtcgatggatatgtcacctacctctaaaataataattagtcataaatacgagcacccgtagggctatcaaaaaagcttgagactcgcgagctgcttgagctcgactcgtccaaggcttgattcgagcttggctcgagctctagacgagccaagcccgagcctctcacaaagctcacaaggtttgtcgagctgagctcgagcttccaacgaaattagtaatatatgatatttgttgttatttaataaattaggatattaaataagtgccttgtattggcatcatatattcatcttattcctttttttctcttctattaatatggtgcactagaaatcaattatttttaaatattatccttgaaatataaattgttttacttaaaagtcaagcttggtagtcaagctcgaacattttataggctcgtcttgagcttgtatcgagctcgagtctaggtagacgagctcgctcgagctcgactcgttgacagccctaagcacccgtatcaaatctaggatttaagtctatataattgattaaaaaacataactaattaagctacgctcacttcgcttgttcccaacattttagcatcggaaagccacaagaaacttcaggggcggagctagctcagtccatgtacctactccctccgtcctaaaaaaaaactcaattcctgagtttccgtgtctaacgtttgactgttcgttttatttgaaaaaattatgaaaaaaattaaaaagataagtcatgcataaagtattattcatgttttatcatctaacagtaataaaaatactaatcataaaaaatttcatataaaacggatggtcaaatattagacacgaaaatctacgaattgagtctttttggacggagggagtacgtgaatttaacaagtgacaccagtaagctagaccatgtgacatcagtggattgttttgggcgttggctagtaaaaaagttgattagtgacaacaggagagcagcagcaggtcctgtacgtctgcgagctctccttccgcaaaactgctattggagtcgctactcaaaagtaatacttcctttctccgttttatattataaaattttctagcattgtctatatttatatatagtttatatatatatagtttatatatatatgttaatgaatctatatatatatatatatatatatatatatatatatatatatatatatatatatatatatatatatatatatatatatatatatatttatttatttatttatttatttattagtatttatatgaatgcgaacaatgatagaaagccttataatctaaaatggaggtagtagtagcgttgcgcaatgtttgtgagattttgtttgttgttacctgccaaaatggccaattattgatgtgatttcaacttagtttcgttctaacctactcaccaagctggcaagccaattaatgtctctaaaatctaactgaatgcacacgcttttcttcagttgattacttacgttttgggattttgagttttagagatttttagcacttggaaatattctttaggacctatttggaagaccttttcttttttacaacctataaaaattggtctagtctcttagagatttttttttcacaatattaggttcgcgtaagaaaaatattggcaatgtttacttatagccttgtaggcatgtatttttaagtatatatatatatatgatcgacatattatttttgataatataattcaattttatctagtcaaaatttttgttattttttatacttgttttaggttaattaaaggatataatagtcactataagttagtagcggcaccatcgccctaaaatcgtaaaatcttaaatccgcccctgtgaaacttttcacagtttcctctttattctctgttctttttactcgcaattctaatcttatcccaaaagataccggacaatcccaaaatgaaaaaaaaaaaaaggtaaacatcgggaccgaatcaccagactagcgagaggctcggcttgtagcacaccggctagcccagccgagcccgagccaagccgaatcggtaccggcttggtctgccctctgcaccgaccaagctggcaagagacacagggtgctccgaaacagatacggcttccgagttggagccaaatcatcgagccataaatctaaagccaaatccgcgcaacggtttcctctcccgctacagcgccgccacccacctctcagctcgctctctctgccctagggtttcctccatctcgctttccctcctcgccgaccaccctagggtttcgatccctcttccctccgaggcgtccccaccggccgggtatggccttgctgatgctgcgggccgcgctctcccccgcggtcgccctgtccaccatcgacggcgtcgtctccgtcgcggctgctgcctccgaccacgaccgcgtcggcgccgcgaagagggcccgcgacggccacctgctcccgcggagcgaggagcacgacgccgacgccgacgcctgcgggtggtcgtcggcggtgatggagcgcagcctcgccctccgccgccgccggggctgcgcgtcctcgccctgctgctcctccttccgccgcgccgccacggtcgccgtcgtccaggagcagggcttcccgacttcggcggcggcggcgcgcgatgtcatgtgatggtccgtggggatcagggccaagcaggggaggcggcggcgccgccatggatctatctagtattaattagagttagagttgcgtagtgtgttagtgtagaactgtagacttccgtgtatagaattcctgtagatcggatgcagtgcatcatccattgctgttcttgtaattattaatgtatttatcgtgtaattaatgcgggtataataaaacaatataatcataataaagtctagtatttatcaattgcttgattaccccagtgacaaggtcgacaactaacaatatagatttgtatcataatcagtgataatagtttgttcataatcagcgataatactattctccgcaagtaaaaaaagtactaagatataattatacggtgtaattgatactagctggtggtctgatgggagtcacagaatacatgaacctggtgaaaaccttcagcaactagtggcatggctgacggctttgcaaacacaagtgttactcatgtacaaaagttagttctctctcgaacagataggcaattcaagcagcacgagacgccttcaatgatttcaaagcctccctgcacagtaagattaagacaatcttattctacaaagaggaaacatacggtatctgcaaagaggattggggcatgatcattctgcaggtttcacagattcaattcagcaggaaagtacagcatatgtatgtattggcgtggaaccacagatgcgatgtgtatcatatcatggtagtattattggtagcagtgtgaagcatgtttgccgaaggtttcacatggacaagagataaagtacgttaccgtagcgcattttcaatctcaatattcgctgggtccagtttgaaaccatcaagaaatgcattgcaggccttttcatagtcctgagaacaaaataagtgttgtttatgaataaaaaaacgattttgccagagcaaatagcggcagcttagaagtaaaatcaaacagaatattacatctcaccttcatgaacatgtgagcggtcccttccctgtagcagcccttgggccaatcagggcgcaatatcctgcaaacttgagcagtttccaaagcattcattcctttacccatcttaagccagcaaacgctcgtgttagagtacaaggtcatatcttcagggtcgtgctcgatcgcctagaaaataccaacaattatcacaattgcttccaaaccaacagagagatatgaccgttgaagtggttttgtaacagatgaacattctggtgtgacatcactacaactaaagttgtctagaaaatctacattgggacatagcaaatatacaaagtcaacatcagattagatttttatagcgaaacacaaacatatacaagttacaaaatcccatttgacattttgtaacaaagagttgccaagaatgccaagtgcttcccttaatggcttaatgtattgctgttaccaaataggcaaaaagtagtacaaacattgtattggctcattatcacaattgggattgttttcgttaacagaccttgcaggaaattagtattgtatatagtaacataaatgtaaaaacacaagataatttaaaattaaagcagtaaaggaattaataaaaacatgaagggtcaattgcatatttgccattagattgaaccggtattgtgaatttgccattgaaaaaactgtatttggtaatttgccaccgaagccagtttgaacccaatctacttgccattggattgacagcttagactaacagggttaaaaggtctgcttttctaaaaattaggacaaggatgcccatgccacaaattgcaaagttgacatcattttggcatagacatcatcttgacatgagcattgtaacaacctagttccacagtcttccttgctggttgttgctgctgctgttgatgtagtgttgctgctacatgctaccgccgtcacatgctgccgatggtgtagccggtgccgcctcctggtaatggtgctggtgctgctgttgttgctgctgctgccgccgacgccgcttagtgctgctgctgtcgctgccgctgcctgctgccgccgcccatcggcctgctgccacagcgcccgccgacgccacatgccatcgccgacacccagctgccgtcgcttacccattcatgagctcttccattgtcatctcctaattcattgcaaccgatttttggttgatctgttcttatttagaagggtgatttttggttgatctgttcatgatttagaagggatgggggatttgggttttagggttcatcaagtgagaagggattgtttctagcttctgttgtgcacacagcacacataagagagccgataggggattgaatctgagaaagataaaatagtcttatcgtgttacccttgttttttactttagtttccccttaactgcaccaaatcaaacggcaatggcatacgccatgtacatgcaccgatttaagtggcaaatttgcaattgatggttttataatggctattttgaattagagggtgaaagtagtggtatatttgcaattctcccaaacatgaattacactctaatttgaattcttgctagagattcaaaacggtgcaggtcatcaaatcatgagttggcacactatacaagagttgggtaatagaatagggtgaaacgcaataccatattgtagagttttgcggcagtaagatagtcttttctcatgtatgccctatttccttccaacttcagatcagctggtcttattttgaagaaagggtcaacctgaaataatgaaaagaagcagatgaaataaagtagaggacaagcatgtaaaggaagttataaagagctaatcagtacgtagattttttggtcataccgcattctgagatttaatctttgtaaagtgtgaacaacaaatacaacagttcaactttagtggtagaaaggttgcactagtttccatggtctactagattcatatttcgaatatgcatccatattgtcttaatttgtagttattaaatggcttgttgatgattgtgagctctacatccatccccttcacttcaaaagatatttggatggatctatgcaaacaaagaatcttttgtgaaggattgcatcatctgcatgtctatttaaatttactttcatagacaagaagatttttttagagaaaaaaaaagaagtccaggcgtaagggaattttcactcaatgatcgtcaacaaacaggacactggtgacatgacaataagacaatggaatggaaaacaaaaatctcaaatccacctcaacatagcgcacaccccaaattttcaccaattatattgatctaacaacttcagtttggttgtacaaaagaaacaagagagttcatgatacacagtcatacttgaaaaggcgaaaaggagaataaaaggctgttacacttcaagtagcagtagttgaaacttcaagaagcataccaattaccaagagacgaagcatacagataattgatttctttttctacaattgcttctagatcctttaatattttttctacaattgcatacggataattttttttatgactaaccaatcgtgttgcccttttcagtagagatttgaattttgtatcaatcttgagtcagggacagggtttgaaatttcggttcgaaatttccgaaatttcgccccccaccagcatttggtcaaattttattaaaattcattcaaattcagtcaaattttcaaataatttcggccagaaatttctgaaatttgggtaatttcggtcacccccggcataaaatcccatttcgaaattgaaaaccctggtcaggaagatgtattttaagagtttacatacaaaaaatgctctagtgcaaattaggcaatcttaatactaagcaataacatctatactccaaaaatcaagtggttgtggacttgtgatagtgaatctgccacccaccaccagcacattgattttttccttaatattacatattaaagtttccatctgctgtttttaattgtttcgcattcttatcacaacttaatatgaaaaggttcaagtagccagacatattttcatacatacatgtagttagttttacagttcctctataaatagataattttacaattagcaagtgtaaacaccatgaatccttgaaataaaagtgaagggcttgtttgacgcaagatagcattattgcaaacaatattaggatatgtacgattttattttattatatacgcagcaaatgcatgggtatttaggtagcagccttaaatattacaatggtgacctagttcatacctccacctgtttgtttacataagtaatcatcccatcaacactccaatcatgcacagatggaatacgagaagttactggaagtaggatctccacatctttcctcctgttctgacgtgcagcaatttctatgggcagaaacccaaactgtttaaaaatagaacaggacagtttactaaggggagagatattaacaagtgcagaaaggtataaatatagcatgtatcccaggcgttcactacaagagctggtacgaatgaattttagacattacatgttacagctcaaacgagtgagatgcaccctttaatgctgcatcttactgtggaagctatgagcacataaaatatctgactaaaacaagacgagaaagaatgttgctcatcacatcaccaaaattgttgaataacacattgaaaattatctaagcagatttcgagtcatctaaagctcaaaacttatacacattttttttagggaaaaaacttacacattaagcatttccagtgcaaaattaactttttattggtattttttactgaaataactaaacagtataatatcatctgtgaagccaagcaaagtgagtgtcagtttcattagaaatttctggcgcatgcatataaaccagcacacagatctacacacaatccatgtatgatttcaaaagaaaaaaaatccttttctgaaaagctagaagatatataccatagcacaataaaaaaacactcttgaaataagaacctacaccatgccgctgaggtttcaaccataacatagcatatgacaccatttgtgaggctgacattagaacttctaatatattagtgcaaccttatttcataatttagcttagagattgcatgcaagtaattcagcaagtatgacggattggtaaagttgcaagtaaaattgactagcaattattataaaaatatatatattgcatgcataaattcagcttgtcgttataaaccatctaaaaaacgtgtactgtaaatctgaaactaatccaagtgtaattgctcggttgtgcacctagaaattatgtgcatgggcatcatgagcaaattattcttaatagacaaattattgtgtatcatgagcaactaggatagtttgaattcaaacataaaattaacaaatcattcttaacagaaaaaacagtatgtttctctaagaggggaaaaaagaacgcgaggaacagtgcattgtgctaaaacctcaataggtgtcaacactacagtcctgtcattaatgcatctacatagctatcaataaaacattagacgaatagtagtatgagatcataaaatagaccatctgatagatatgaatatcaataatataatttccatgagtgaaaacaaccactcgatgtgcagtgaagaaaattcagtgaaaaaggaaaagagttactttatcaggcacatcaggatcagcaccaccctccagtaagcacttatagaaatcagttaagccttcagttgcagcaactattaagggggtaaaagtaccaacacccttaacatcagcaccagcctaacaaaaaacaaatgcagatactttctctaaataagcatgtcatgatttgtacaatatttaaaacttaaatatccaccaagttttgccttctaaagaggagttcaataatgtaatttcagtttggatttgaagaacaaggtatatcacctcaatcaaaagcttacaacatttcagtgagcgacccatcatcgcagcaatgagaggtgtacaaactgtagagaatgtcttgttacactaataagacaattaagaaaaattagtgcccatacatgtcgaaagtagaagatggtttgcggacaaagaaagaggtataaaaagaatatcaaaccatgtcaccaaaatcacaagtaagtttgcagatatataggtaccatgcaaaagcacataaatcatataaagcatagttatcagacccaacacgatcgtatactcagccctggatcactgggtcaccagttggaccacatgttttgttttagatattttttgtatatctgacagacaaaagaacacatacatttatacacagttaaattccagtgcaggtatgtgatttacaaatcacatttactctaacctatcatataagaacaataaaaaaacctttaaatttatcactgtcttggtatttgggtacaataaatgcagattaatcagtttcctcttattctttcactataatactactccctccgtcccactcactaaggcgcgcacgcattttaaaattcaactcttcaaatatttgaacaacaaatagtttattgtaaattaaattttatttgatgaaaataatatcattggattgtcatttaaatttactttcatatgattatgattttgttgctacaaatattatagtatatgagaaatttaaagtcaaagattagtcttaaagaccatgccaagtttgaccgcgccttagtgagtgggacagagggagtactattatgtcacaatagcacatgcggcacagttggcaaggcaggcaactgaatgcaagcagggcatgcattcaaaccgatctatacgcattttttttgcaattttacgcaacagagggtagtttgcgccagtctgatcatagatggttcacataaaaaacagtaatttaaccagtattttactgattcaacatggaccgattgcttgaactatccgattggctggagcagacccaccaaggctcttggtcccgctttttctggtcaaactgctggtccgatctggattttctaactgtagcagcaagtcaagaaatgcttcacccaggtcactccaccgaagttgcacttcctctgtccccattattaagccaaaatttattatcctgtcttccaacatctcaactccttgatgcaaccaattgctaataagcaagccttccatcagatggagggcagggccgtcgtaaacgtcaacaaagacctcaatgttatgcagcagttgagtacctcctctagtctcaaaggccttgacattgcactataaatagctttctttttagttcatccatatttacaactaaataattgttttgtttggagttgaaaatactcattccatccaaatgacctgaatttttttcatcgctggcattcctttcagggtaagaaattgattgcttatgacatttacagcaatagacattttctatcagatcaaacaacaaaccaaaagcctgtgtgcaatatataataaaccaaaccaacaacttcagtctgtacacagcctggcaaaccactaccaagtatagagtatagaccaatcttacatgaatgtagatgaaattaaaatatattatctcgtagcatgaactattttaatgtaagcggcaagcaagggaagaaaagcatataacaaagcttacatctgcatggtggtccaacaaaatcttcatacaaccatcctgactttttgaggcagcaacatgcagtggtgtcccatggtcagaagatgaatcaacattagcacctttcaccagtaagacctttactatctcgcaatgtcctgaattagaaatattgagtatccattagtgtaagtgtgtaacgatgtagaatatatagcaagctatttgtcactgcaacagttttattggtgaaatctagtaactttattacctatacagagacaatacctttttcccacctaatgtccattttgaaccgtgttttaactgatatcttctgtgccaggagaaataacaaatgggcccgtgctcacatgttttgacaactagtgatgagagcaacagttacaatactaatataagttgttagctccccgaattagtaatagttgccatcaactataacccaacaagtactggttaagttgttaaatgcattattgtttagcttcagctaactaatactagttactctctaacaacatgcataagcttccccaacttatcaaatagtaaaaatgtatgtaacagtacaaattctgtcaaagatttagagttgacaacaatgaaagacagttagcaggcaaccttaggtgccacctcatccaggtaatagttgttctgtgattagacatacatagctgccactcgaaaaaaaaaaaagaacaagaacatatctattacatctctaacatgcccagcacatatcattatgctcattgtatagaacacaactgtgtacatgaatgctaaacaggtacttgtgaaggatacgtgatcatttcaaaaaacaaaagatagcaacttcaatgctcctcctactctttctaatctatttcaattctcttattcccttttctttggctcacaaaaacacattagcgacaaggggggaaggggaatatgaaaggaaatgatggcatccccagctaaaaatggaagatgaagaaatgcaaaagggccataaaagattagaagaagtttagcactagagtgctaaaatactagtgggagtgatattagtagcataataattagcataaccatttataacaatattacatgggtcatttcctattccgaatttataatggataacctacattttttgcaactttcattatttgcagttctcctaacaataaaaaataatataaaaaacagtgttgtgcagccatgcacatataaaataaaggaaatgcattgagagggaccttgttcaactgctagatggagaggggtacaccctttttcatttggcttatctggatttgcaccatgatcaagaagatagctcacagtatccacaatcccaccataaattgcataaccaagaggcgtagcgcctattggaatcattgaaaaaaaaatcagatttcttgtaacaagcaaaagaaaatccacactgatcatttttcagattgccttgtgaaagtataggatagtagatttcctgacatgtggtaaaacaaaagtgcatacttttaatttcagcttgataagcgccaaaagaacaaaactaaaataataagtttttaaagatgattcatcagaattaagaaattacctgctcaatttaattacctcatcgagttgcgttatgcctgtaacagtactagtaactctttcggttgaactatgcacgtcaaagtaacgtaaatccaactaaccccaaactccgagaatcgactgtacggctgtagtgtttgcaaagcctccaactcacggaggcgcaactaagacctcaatctataaaaaaaaatttaaaaaaaaagggaaaaaaacggggattcctcttccacaaaacgaggaggcgaagagatcacctaactcatcggcggcgtcgatgtccacctggagctcctcgaccatgtacgcgcacatcgcggtcctcccgtagcgggcggcttggtgcagagccccagcgccgcggttcttcacggcctccaccgcctccttgagccgccccttcccgccgtccagcatacgagcaaactctgcgagcggatcggggataaaggaaaaaaaaacacacatcccaacccccaaatcagctcccgatcgagcaccaaaacgcagctaaaccatgcaatccaaaaagggattaaaaaaaacagcgaaaaagcagcggaggaaggggcccggccggcggagcgagcacgcactcttgaaggcggggaggtcgccggcggccgccgactggatgagcagctgctgcggtacgccggggcctgcaaggggagggagaaggaggaatggttagcccgcgggcaggtaggtgaagctagggtttcgggctgcttgctcacccagtacgaaatgcggcgccatggcggtgggttttttgggagagtgaggcgggaaggcgaagctgcggaagtgggggtggaaatgaggggagccactggcagacggggggaggtagcaagtagcaacgcgtggactgccaaatagacggaggaaaataagacatttttattgctgaaaccgaacttagatcttgtaatagactagacctatctcggaagtgtctccctccacatctatgaattatcacttaaccctagcgttattttcctctataaatagctttgtacatcctcaaaaacaattggattttgtttaattgaattttgccaagtgtcattcaccttgtctctagtcctcgttcgattagtcggcgactatagattcatagcccccaatagttggtgtgttgatttgccaggtcgattagatctaccacgtcaatcgcaactatttctttgtgctaattacctattcgcaatttttagattacatcttatcttgttcttacagtgttctctcgtttgcattgcagggatcatcaaccgcgcgtcacggttggtacgacatcgtttgtggtgtagcgattgcacggcgttctggacttgttcttgttagtagccacgtcgcaaatgtcgcactcgatcaaagcgagatttatcccttcaccagaagatcgggccacgagagatagtgtcatcagttggtattagagcttcagttacctggtgaggaatttagttttgtaattttttccccatcatccactatatagccacaccacttttccattggccaaaccatagatttatgccttgcgattatcacagtttgcgatattgaattttcgtccctcgtcgtgtcgaaagtgctggttttagtttagatttgtcttagtttgagtttgcatctggatcgtcgtcgtctcggactcccgattgaattgcagtgtctatcgtagttgtcctcatgttggatcagttttgtgtcgttgaattctagtccatggtcgtgtgtagtgctggcttcgtttagttcttagttctggtttgagttttacttttgatcgattgtgtcgttgtccttgttcggccgtgtatagttctttttccaaaaaaaaattaaagtatacggacacacattcgaagtattaaacgtagactaataacaaaacaaattgtagattctattaagcctaattaagcctaattaattcgtcattagcaaatgtttattgtagcaccacattgtcaaatcatggcgtaattaggctcaaaaaattcgtctcgcaatttacatgcaaactgtgcaattgtttttttttctccacatttaatgcttcgtgcatgtgtctaaacatttgatgtgacggaatttttagaagtttaaagcgaactaaacacagccgaacttgaaaagacactttgttcacggtggacagtgctacgtggcctttgaactgatctataaaatctggacacacaaaaatactccctccgttccaatgggccccgtttagcacagctctaactcccaactccaacttacctagagttggagctgtgccaaacggtacatactctattttttggagcggaattggtaaagctgcgccacaaatttgtactacgggggtagagctgggtttttactgctctacagctccactccaccctaaaagacccactaccctttaattttttgatgtatttatacaaaaatgccactaaactacccctaaactcctcctcctcctcccattctctctcctcccatcctcccatcctcccatcatctccggtgagatccggtggcaaccgacggtgggcgggctggcggcggcgacgcacggcctcgacggcggcgcgcgggctgaccggtggcggtgtcggcgtcgagtgttggcggtggcggtgcccaggctgacggcggggtgatgccaaccaagtgttcgacgaaatgactacaagggatgtggtggtgtggagctaacaagtctagccaaacactttcaaacccacctcagctcctatacgagctagcttccactggagttagaatttagagttgggagttggagtttgtagctctaccaaatggggccgtagcaatcctatgactatgaatcccatcttaaattgctacatattgggagagtagttagagtgtttttgggacttttaaaaataaaatcaaatagttttatttccacatatgagcaaacaccagcacactagaaaaatatatacttccatccatgtataacattgttgacttttaacaaacatttaaccataaatttatttatttatttataaatatgtaaaatataagtcatgtttatcctacctttaatagtaaaacaaattagaagaaaataagcaaatataagttaggtttaaactgcctttaatagtgaattcttagagtactattattcaaatttttgtgtgaatattaaaatatatataagttaaattacctttaatagtaaaacaaatcagaacaaaataaataaattacataaatttttaatagtaagacgaaatggtcaaaagagtcgatggtgttatacgttaagttagataccggaggaagggatattagggtttagggtgacaagttataccagaggtttttttgcccacagcaagacagtttattttgagagcaagttccaaaagggttcattttcttaaattttatttgaaaaaaggttcaagaaaatgtgactacggctcttcgaaatgatccgtatatatagtcacctaatcactatatggatctgctcgtttttatagttcagttgtgcataacctagaggtcaaccaatatttatgcatactaaaatcttcgtgcggcaatatgcaaatatattcatgttggaatgtcactcttgatcctctctaccggtctactctcgtctcggcttacaaataactgtcgatagaaccatgtatacagcgtctcggcttacgaataactgtgtacacagccaggctgtaacctatcttgtcggttgctttttcaggaaactgaaactggccggtttgccgattttgattttataccatgtaaagcgacgatcaccagttttccggaaccatacaagtgaggtgagcgcacgctgcgaaacgaaacgatcatttgattgaggagccgcacgtcaggctatacaacgtcaagattaaagaaggtagtaacacagaatgtacaaaggtgcctgtctgcccgtattagttcaggatctaaaccggagtcttcctgtgagccagctactttcattctaccatttttcacattcatattgatgctaatgaatctaaatagatatatatgtctagattcattagcatcaatatgaatgtggaaatgctagaatgacttacattgtgaaacggagggagtaccttacctccgaggcaacccaccgactttcttcagagacgaaactttggtaagagtcgttgagcttgttcagttgtttaggaactatttacaagaccaggtggggtatttcacaaaacggcctttgcaacagcgctacgctggcagattatcttatgattttcttctgagaagatggcaatccaatacccactttggcagcatgagatatcttcaaggattcgaaagatttcctgcatcagagttatgataatcactatggtgtaatggaatgttaatgcatggtctgtgttcttgaggacctaaataggagaacagtcatatagagataacaaggttttacccaaaaaatattaggcagctgccatatgtatgtttaaaaacgatattttgttgtggattttgttctctttttgagcaaatttacccgttgtgaactagaactttcaacaatcaatgtaaagaaagataagtatgctaccttaatgcttctgcaatctcatcacttgctggatccaatttgagtccatcaaaaaacgcatcacatgccttttcaaagtcctgaatacagagggtccagaagcatttcgtcaatacatgctggcaaatatgggggtagcaagacaatatgtactggaatattcaccttcagtaacatttgagcagcaccttccagatagcatgccttcgaccagtcagaatgcatcaacctgcaaatttgagcatcctgcaatgcattgacccctgcacccatcttaagccagcaaaggctcctatttgagaatagggttgcatcatgcgggcagatatctgttagctacaacaacaaaccaaatcgacaatcaccacatttgttaattgctaccacttgcatatcatacaaaaattcccacttgcatgcaatgtttccatgttaggctgcttagccagatgtggctatctgatatttaatttccaactcaatagtgtgcagatctgtagacatatccatccaaaccacatagatttcttccaaaatccataccattagaatggtctacttgtttcagattttttttacaagaggtacagtttggtgtgataataattgaggttttgtaccaaatctagatgacctctattgagattttataggagtgttgacaagaacatttatgtaccacatttcatataggaaatgcagaacaagaagtaaccactgaatcattataacgatgacagttctcattagcagcccatgcaggagagcagaacattgatttctccacatgaatgtgaatttattaacacaaagaactgtaaaccgaagcagcaaaggaacatacaaatagaggcactgtactaatatctaattcatgctagggactcaaaatgatgcataaacatatattatgaactgacagtatcgaaatgattaatcattttatgagtagtacaagaacatagtgcgataaaataccctagtatagagcttcattgcagtaatgtaatcttgtctcctgtatgcctcacttgctgctaacttcatatcagctggactcattttgtacatagggtcatcctggaatgttgaaacaggttatttgtcatagactaagggggtgagggcatgccacatgagtgtgatgaagacaatagttacacagatttgtttgagaaagatatgaaaagaataccacatggatcatggatgtgaagataataattaggagactggaaactgtaacgtttccagttttgcacccaacatgttcacataaaacctaatgatttctgtgtatagaatgaagctgagaaaaaaaaaatccaaaacttaaactgaactgtttagacaaaaaaaaaaactgatctgcacaatttatacccaaactagatgagtacagatagcgcggctttgtttggttccaacaaaaccaagagttcgtgatacaccataccacccttgccaaaaagagaaggcagaatgaaaaggcaccacttaaagtagcaagcaattgataaggcagaacaaaaaaatattgagatatatcaaattgacattcttttctattattgttactagacccttgcatccaaaaagaatattctacatcattttcagtcaaccaattatgatgcatccgaattagtggaagtggaattgtgtgcatgcattggagaaatcttaagagtaggaaatatcctaatgcaaatgataaacttattagaatatggcaatgatgcttcagatcatacctccaccgatggacacgatttcacataactaattaccccatcaacactccagtcacacacagatggaatacgagaagttacgggaagtaagatctcaacatctttcctcctattgttatatgcagcgagttctattggaaggtggccgaactgttaagaataaaacaaagaaaaaaattagctatagcatttgcaaaggctatgccaattaattctaatatcgaacattacagtgcaaattaggggtagtaccagagaaatgaaattatgcctcacaacaccttcattgtgaataacatgcatgtggtagctaaatcgaaaagaaaaacttacttcatctggaacattaggatctgcaccagcctccagtaagcacttatagaagtcagtttgcccgttgtttgcagcagttattaagggagttaccgtaccaacacccttcacatcagcaccagcctgatacagaaaatattgtaggtgcatcatctaaataagaatgccatgatttgtataaattttggaattgaagtattcatcctactcaaaagttcacaacatccaataccttaagcagaagcacaacacatttcagcgagccagcattgagagccatgatgagaggtgtaaacacaggtttgagtagcttgttaaactgagaagaaacattgaaaaacactatgattaaatgatggtaagttggcagactttttttttttgggtcgagagttgaggggtgaaaggattggtagtggcaagtccagaatgtttcatactccatgtaagctccacttagtattaaggtattcaacaaaaatgatctggtccctgtttttaatggtgcaccagtaaagtttcaagctaaatacatgataagaacacttttatgcgatgaatcgcttttgaaataggcttattacagtcctgggccaaagatagacaatatcccaagcatggactcgattatttttttacagtccacatctgaattcacaccatgccacattctgcatgctcaatcagtggtaaaactctatgttcaggcggagtcaagactaaatttaaccaagcgtagcactataattaaaagaatactaattataaaagaatattggtttaagtcgttaagaatacaggatatgttccttttgtttccttttaaggattctaatcaaagaggtagtgcgacttttcttcgtgggtcatcatttagtgtcaatccatcattacaattttttaccatctcaagtactctatgcagacctcccaaaaaaaaatgtactctatgcagacaacgaaaaacaaaaaattaggcaatgactggatagaccttattaatggtctctgtcagtgagaccatagttgcagccccttgttattttcttcaccaattaaaacattaccattcctaatgtactgaccacttataagttgcgttttcttttcagttccccctcccctctccttatatatatggacaattgaacgcgaacaagtttcctagcaatttgcattgggttcaaatcattgtacatacttctgaacattccttagtatttccaggctattggcatttggtgttttgttatatatgaaatggatcaagaaaaaagttatattcagaacaaatcagttttcactgccaaacaaagcatgtttcataattgaccaaactaacattgtccacaaacagttttggtcagcatggaaagtcagtttttgagtacacctaccaagagaatcaaccgaagtcgcatgaataaaagatgccacgagagagaagtagtggaaaataatctagtagctttgactattattctgaacattagtagcaagcatagaaaaacatctaacatacatctgcatggtggtccaacaaaatcttcatcacaccatcctgctggcagaaagcagaaagatgcagtggtgtcccatgagaagaaaatgagtcaacatgagcacctcttgagagtaagatttttgctatttcacactctcctgaaaccagaaatatacatgtaatagataattagatattatatacatacagaacaatccataatatccaacaatttatttgcataatacaactatccagcacatgctagagacaatcatcaccggtaggttcccatcgaacatccacacacagctggagtgaaatacatgagtgctggagatatttgatcaggaggagacagaatatacaattaatacatctacatctttgaacatttaacaaattttgtacaggagtagaacccatgatctaacagtggagggcccactagttctttaatgtatctaaacattgcaatatgtgaaaaggggacaagatcatttagtgtgtacatgtaaaccatctttggactccaatatgttgatatgctctcatgcccaacatcagagtgggaaacatattcacttcgtaagttagctcaggagataatataatgcacacatggaggacaaaccccaaagatgcaattacaccatattgatgcaattacataacagtgtcactcatttatagatgcattagcaaccatgtcagtttaaataataactgaaaccaaattgattattttgcatgatagggacatgctaaattagttctggacatttatatatgttgaattgattacagtactcggtagagtacaagttttaaacctttcgtcaaattcagagcagagaaacataaatcacaatactacatatacttcctctgtttcacaatataagtcattttagcatttcccacattcatattgatgttaatgaatttaaatagatatatatgtctagattcattaacatcaatatgaatgtgggaaatgctagaatgacttacattgtgaaacggagggagtacaatacatagcatcatagtataagtattggctttttaatttcaaacaacactgactgaacaactaagtactaacacaaaataaatatggtagctctgcacggttgaatgaacactgtcctatccatgaaatgttgataacatattttcagacttgaatgaccacaattaaacaacttgttcttgtccagcaagatatctcacaatctgttgcaaatttcattatctacaaccctccggtatagaaacaaaactcttaaagcagtgtcctgcatgcatatgataatagatatgtattcaatgtgcatataagtgggcctttaatagctgccacatggagaggtgtatatcctttattatcaggcttatctggattggaaccatggtcaagaagatacttcacaccatcgatggaacgaccacgaactgcataagccagaggtgtatcgcctacagaaagcatcaaaagaagtttaacaaaatagagactcatacaaaaaacaacagaaaaatgcatgctaaggtttttgctaagccctcaagagaatgtttttatatacctaattaaatatgttccagtctctaaatacacatcataagtatatacaccaatccaatgtagcgtggcttcaactcgttggttagtattggggcctggatgatttggaaacactgtaacgattatgtgttcaacggtgcgcagccaaatgttcaaagggtcttgtatctagccagtaaagaagcttaactatggagtttggtcggcgctagaagtctggtgcagctagctgcaggttaatccttacgctagggagttttgggatgtatgtgccctgtatatgtggggtgtgtgtgtgtgttgttttatgaaatcttctctcttaatgcaatgatatgcaactcccctgcgtattcgagaaaaaactatctacacttgacaattgcacattcagatttacaggagaatgtaagatatcagtttccttcagtacatcaaaatatcctggactcctggtgcctataaacacttcattaatttgatgagtatcatcagcacaaattatattgtgggatgtccagctcaataagaataaataaacttaaaacagtaggaaaacaaggatagagttgcctatgtgcagataatcacacagtccatgtataattcaccctaggcaaggtgcatgtttttgtgaggcaatattatgttaatatgtttcttttttttaatatcaaacaagaagatattaccaactgaacaatcagataaccagttgtggttggcacagaagaaattaaaaggttattgtcgagttaaaacccaaaatcataatcaagaagttgccagttgccactaaacctaaagcaagctatttctgatggtacagtgcacacagacaaaaatgtgataagctgcattccttgaaaggtctttgtatatagaaagaagtgtatagaatgatagaaattcctttctgaggtaaattgatgaaaattagcagcaatggtttttccaatgaagtggttctgcattaaaatagtaaaatatgtcatgatggattgatggtagcctggtacaaatgaaaatcataaacattagcatgattttacagcatgaggttgtgtcatgtacgtttcctagtaagggcctagttttacatagtttaatttttaaatttctcagaagataaatatagggactgaaatggaattcacattcagcatataagctgagtttaccaagtagtccttgtgtaatattttagttatggctaatcgagagcagcttctaccaaagttgtaaaatatgtatgccaaaataggagagacaccaacatgaaaaccattactctacatggctgttcatcatgcatatcatattaagcccaattcgttgggcatttacatgcatgcaagtgattgatgttcatttcaatactagagaataattaaccaaatattttcaatatctgtgcacaatcccattcccatctagaggaaaacaaaaccgacagcatgaagcaatcgtaatcctcaacgaggtaatccacattagtcatcacaataaagcatgccatgaacaaagcacacagaaaaaaaaaactcaactgatgatgccatcgtgcgtgctgtgaaatccaacaggcccaaaaattcacccaggtgctacagaacgactagataaacctagggtatcgcacgaggagtcagcggcggagagatgggtaacctgaatcgtcggcggcgtcgacgtccacctggagctcctcgaccaggtacgagcacaccgcgagcatcccgcggccggaggagacgtgcagcgccccggcgccccggtccctcaccccctccaccgtctcccggaggcggcccttcccgccgtccagcttgcccgcgatccctgcgcgcgcgacgacgacgacgacggcatcgatcaatcggagagatcgatcagccccggccccccggtagctcaaccaaacgcaaaaccgacaagcagcaggagaagacgggaggggagtagcttggcttactcttgaaggcggcgaggtcgccgtccgccgctgcctggaggagccgccgcgtcggcgcccggggatctgcgcgagaggccgagtaaggtggctaggaatcgggtgctagtgctagccgagcggagcggagatagggttggggggggaatcgaatcgatcgcttaccgctggggagaggcggcgccatggctgggctcccggaacgtggaatgatggcggagtggagtggcaatgctaatgctagcgagaggaggtcctctgcctagggtctatgtatatgtaggcgcacggcggggagggggagggggaggggtcgcgttgggtttcgggacatcgggtcggtggggggacgggcggggagttcaatctgcgtgcgccgaccgaccgaattggctcgggcacacaggggggagcgtacaggtggagtgcagtgtggtttgggcctttgggcgtttggagttggactgcgcggccgtgttgtgcagtgtggtggagtcgtcgacgaactcgggtgccaacaaggtgtgttaataaaagtttttttctttatttgtgagtggaattttttctttctttttttagtggattattttctttgtaagacagttcaaacgtacacattcttgtgtatcaagtttcattagcctatatgacattttaaatagagttaaactcaaataaaacatgcattgataatgggacaatataaacaggaaagcgatgtaaaaataataaaaagcaaaagtacgaattaattagttaattcataaaaatgcaaaataggaaggggtttgatatggggaaaagttaggagattttttagaacatgccactcaattcgcaccacctttaggatttgccattcaattcgcaacactttcagaatatatcactgagcacgcgaattgtttcattccgtggcactccatctctccgaagttacacgtcatcgcccatccgtatcgcatcgcccgttgcgtcatcttgccattgccggtgtaggggaggaaggccgccgttgtggggaggaggagcttggctagcgttggggagaaagagctcgccattccggtgcggggagaaagagctcgccagcatgtgcggaggagaagcttgtcgacgtggggaagaggacctccgccagtgcaggaagaagaactcgttggtagatgtggggaggaggagcttcgccagcgcgggaaggaagagctcgccggcatgtgcggggaagaagtttgccggcatggggaggaggagctccgccggcgttggggaggagctggcgtggggagaaagaagaactcgccggcgtgggagatgaactcgtcagtggcgcccagatgacttagatgaacttcgtgacaggggcaagcgatggcgctcggcttcaaagggacaaggtgtcacggaatgaaacatttcgcgtgctcagtgacatgttcttaaaataatgttacgaattgagtggcaaatcctaaaggtggtgcgtattgagtggtatattctaaaaattctcaaaaatcagatttagccccctgggggtaactcctaaaacaatagagaatgcaattccataactcactgccaagcaattgattaaaagtaataaacaatatcaataatcaataacaacaaatacggtgaataattataaataccagcaatataagaccttaaacgcaaggtaaattttttttgacggaagacgcaaggtaaattttgatacacgacattacgacttcatggtttagctgtagaatactacacaaaatcatttttgaggaacaccctctgtaaatatggttatttgccagaaaacactgtgctcattaaattagtgttttcatgctaacgagacaagaggaagcccacttaatttgttacacggtttgaccaaattgctacttcatattttgcttaagttcgctgcatctgtctgcttgttacaacccaaggtttccatcctgaacccaatgctcaccttgtgctgacgttgccgccaccgccaccactctcttcgtcgcaccgaccaaccctgtcgtcgagatgcaaggctgagctcatgtttcgtgggagactaacctgcagtcatggaatctgtgatagagccggtgcatctaaaatggttgctcaaatggtaagttcgattttccgtgattctacacatgaaggcgatttggtcacgtcatgtaacaaagtgggcatctctctcgtctggtcagcatgaggggtatatatgttttccttttcctttttgaaaaatccaggggtttaggcacggaatctatctatctattatattactaaaggaatagaaaaatgagcctccacgttcgctctcatagcctagaaattctcacattaatcggagaaaaagaaaaagcagagtccatatagaaatacaatttagaaatagttgaaattcggaattaaaaaataaggaatattagaaaaggagactagagtaaatatataaatacaatttagaaataactgaaattcggaattaaaaaataaaaaatattagaagaggagactagagtccatatagaaatacaattagaaaataactgacattcggaattaaaaataaggaatattagaagtagagtccatatagaaatacaattaggaaataatataaattcgaaactaaaaataaggaatattagaagtagagtatagagtccatatagaaatataattaggaaataatataaattcgaaactaaaaataaggaatattaaaagtagagtatagagtccatatagaaatacaattaagaaaaaaatagaaattcggaattaaaaaaataaggaatattagaagtagagtacagagtccatataggaatttaaaactaactaaaattcagaataaacataataaaattaaaagtagagtttagagtccatataaaaaatacaatttacaaataactaaaattcaaaactaagaaaaacatgggaaaaagagtttaaagtcaatataggaatacaatttagaagtaactgaaatttgaaaataaaaattaaagaatattgatatatgagtttatatagaaatacaatttagaaatagctaaaattcggaattaaaaaataagaaatattagaagaggagactagagtccatatagaaatacaattaggaaataactgaaattcgaaattaaaaataaggaatattggaagtagagtatagagtccatatagaaatataatttagaaatagttgaaattcagaattaaaaaaataaggaatattagaagatgagactagagtccatataaaaatacaattaggaaataactgaaatttagaattaaaaataaggaatgttggaagtagagtatagagtccatatagaaatacaattaggaaataatagaaattcggaattaaaaataagggaaattagaagtagtgtgtagagtccatactaaaattcggaataagtccgtataaaaatacaattcacaaataactaaaatttgaaattaagaaaaatatgggaagaagagtttaaaatcaatataggaatacaatttagaagtaactgaaatttgaaattaaaaattaaataatattgaaagatgagtttagagtccacatagaaatacaattagaaataataaaaattcagaattaaaaaatataaatattaaaagacgggtctagagtccatatatgaatatatataatttacaaataactaaaatttgatattaaaaataattaataactaacacgtatataaaatacaatatgaatattacacgttagtagtttcgtaaagttattgcaaaatttaaaattatgctatcattttaatatatttaaataatacaatgaaaaaacatatatgttattatatgagaaaaaaaatataatgatgctagccgcgcaatctgcgtggtcaccatgctagttttcataatagggaaagatgcacggaatttccagagaatacaagggctcttttgcagattcacaatttactcaagcaacggagttgttgtaaaatccaaggcaagagaaatcttatgccattctatggaaaaaaaaccatcattttgaacagaaggcctattatttcctgaagaaaagaaaaggaagacactagacaaatgatatagaggagttattattaactaacattgcttggaggattattcgactatccaattaatattttgaaatatatttatgacaaaatttgctatgggacaatttaaaaacggaccttgttggataacatcataaaaatgtggtttgctagtggatattctagtttcttagttctttgccattaggcacgcattattttatcatttcttgccattttagatagacaaatgacacaaacgtccttgctaaactgtataaaaccgtgcaaaatttttcaaaaattcaaattattttttaaatttatttgaatttaaggaggttaccacggtatttatattatcgtaccccgcggtaagcccagtaaccacgcggttactgacggtaaggtaaaccaaggttgtccctagtccgagcaaggaagaggaaaataagaggaagcaacacagcattgtcagagaggaacagagtaaacgagagaaatgaggtgaagggcatttttggtcatttagcaaagtttctctctttaaaatggcaatgaatggtaaaataatatgcacggtgtctgataccaaagaaccaagaaattagtgtccactggtaaacccacatttttgtgttaccaagcctctgtttgaaagctcctttagggctacttttttttttttttgccgcatgtgaaatgagaaatgccattaccattaattaatattctttttggcatagctctgtgtattattagttccacaaatatataaatatatgatactagatttacaatcacgttgataacattcaaataaattattttataccaaataaaacctaagtaatgagaaaattctttatgtaccctaatagtttgcccgatcctttttatacccctaaattttactcattccattatatacctccctctttccgttagttgattgtaaatattttattaataaatccattttaccctttggtataaaaaaataaatttatttatgcaatatacaagtctgttgtatgagacttctaataacatatgtattagaatatttttaatattttaaaaagtgaaggatgtatatagcagaaggatgcaatccgcagaatcatcagaacctagcttctctgtagcacaaaatgcagagtttaatgccacctggagaacatccacaggtacgagtgtatagtagtagcacagtatcagcagctatgccagagatatttaaccatttttgccacatttagatgtgtaattaactttttaccactggacccacatgtcatagatacatgtggatccacatgtcattgagatatgagtgacaaatagttatttgccaaatctaaaagtggcaaatagttaaacccccactatgccatcccaatgcagcattgcacacactgccaccccaaacagcagttatagacacgaatcaccgtgatgttcatcagtcaccaccccggttagctactttgcttcaattataaaaaggagataaaccattctggttctgggtatcgaagtctccaggcaaaatgtgagaacatctgtggactcagggaaccagaggctctttgcaaaaagtgagacgccttggacaaaacgtgtaggagaggaccagggcgccttgcccaccttgcaaacacccatgctgttcacctagcctccgtgcttgcagatgccttcaaggacgccagagcttccctgcatgtttcaagaactatgagagaagatgcgataatttacgatggttttgtccatcgatagatgcagcaggcagaacttttgttccattatttaaaaacgaactatgagaaaacaagttcgatagcttcataactcgtaattcctctagcacgggtgaatgcactatgccaataccttgatgagaaatgcaatgcacacctcctctttagtttacaatttacgttaggaaattcattggcgggaagattccatactcccatgtaaccattgtgcctagtggatagtgctgatcaaagagcaagttttggtacagtaagatatggatggcatcaccgctaaagcaaaagtcctaacaatctcccaaaaacagaatggaatttaaacaatattcataccccacaagttttcaaggcataagtttatgctaaacctaactacaagaagccaaaggccctgttcattaaacttcaccggactattgccatggatatttgctccacacctctaaagattcattttctaaaaaaaaaacctttagttccaagctagtatttgttaaagtttatttctcaaaatatttacaattaatcccaacagtgaagtagataatccacagcattaatccaccaaataatctgtttcaaacagagagccgtagtgtggccgaaatagacagaaaggataccgtaatgcatcctccatctcagagttccctggatccaacttgaatccatcgtaaagtgtttcgcaagcactctcatagtcctgatgatacagtgccaagtaaataagcaaataataattttcagcacaaaaccaaaagatagataattgcatcatctattaaccttcagtagcatcagagcagcaccctgtcggtagtaggccttcagccagtcaggccgcaatttcctgcattcataagcatccaacaaagccttgtgtccatcacccatgtgatgccagcaaaggcttctatttgagaacaaggttgcatcatcagggtaaaggtccactgcctacattgaataaggaaaagcatgagttagcagatttactgagaacataagaacagttatgaatctaacacctagaaacaagaaacttgcacatcgccacactactattacactagtagtctagtatacagaaactggttgagcaaactagacaacaaaactagaaaatatgcgtgcgtgctcaacaaatgctggttgagcacacacgcacgcatattttctagttttgttgtctagtttgctcaaccagtttctctatactagtgtaatagtagtgtggcgatgtgcgtgtgtgcgtgcgtgctatgtttcagtcgcaactcacaagccaagcaactccacaaaagctctactgtagtttctttcatggcataggagtgacaacaagagcactgagaaagtgagtctcctagaacaattgcgctactctcatcacgcacatattctctctttccgttatgataaacaggtacacctcaacaaagcctatgtgaaaatagtataggaaatgcaccacataactgaaagaggaaataagatatctaggacatggcactctataggtatggtccaaagccccaagtttttggtaataccccttgtagcaacattgccaaatctttggtttggctgttttgggaacacaaaaaaatagctcctatgtacattgagttggattttttttttacccagcgacagtaaattttgtacattgagatttttttttctaaaagaatacttcagattaacttgtttgcatgcgagaataagcaaagccaggtcataatctctgtacaatgtatgaaagtacaagttcaaaatagagatgaacaaaatgaggaaacttggtgttctgaagtacctgactgtagaatcctgttgcagaaagataatcctttttctcgaccgccttattacccagtgactttaactctgttgctttccttttactgacaggctcaccctaaatcatcaattatatcaacggataagtgctatgcaggaaaagtcataacaataagcaaccatctaaattcatgcattggaaattcaagcaactctgtatcactccaagaagcatcaaacccaacaaattacaagaaattgtgcaagctaaaacctggcaataggggtggaagtaacatcaactgcaaatgtcacttgtgtgctcattaacatagcagcatccgagagaaatacagtcttttgcatcagtagaatcaaacagtgccgaactaattagagaaatatatcacggttgcttagtactagaaacctgagcaaatccctcaaaaaacattgccacactgaccacttcaacgtggacttaccagggatgcttgatcgtagccataatcgaaagggtcactccaatcaaaattgaatgcaaattggaagctccaagctggagttccaacctgagagtgagggttctcgaatgctaccagcttactcccttcgctggcccatttcgcggaagccatgagggtctccatctgagcctgcgtatctccttgacagcccgacgagcagaagcatccattggtcaccacgacgaccatcctctccagcttccgcgcacgctccgcgacgaacttgaggaacgtgagctcgctctttgttccgcggaactcgcgcatgatcaccttcttgatgtggtgctggacacactcgatcgggccggcatcctgccagaacttgagattgagcttgctcttgccggttggctcatcttcaactgcagactgcaaattaaaccaaccagttagtcagtatgtcagtcactcacatgttcaggtagatatagagaacaaatgatttgatcatgctttgccagatagtagtagctactcattactgatgggaaacaccaaatgaagcaaccagtatattttacatggatatggagagtctcgacattggggaagcatttgaggaagcttggaagcattctggcttcatagcggactgtgaatttcacctctagtgccaagatcttgacactcgggacaacagtgcttgggctcaatttcatccccgcctgcaaatgcgaagcaaattacactaattgtgtcacatttgcacgggaggaacaggtcacgatcgaaatcgtatgtgacatttggtggttgggatcaagatccagcaatcaaattatgaacctggatgatggtgctgccgatctccagctcgtgcattccaggctccatgaatcccagcgaccgcagcttgggcgcattgcggatcttgaccatggaggagaggcagctccggtgcttgctcgtcatccagagcatgagccgctccaggcgcggcgcgtccaccacgtcgacgtagttgacgacggtcaggcagacctgcaagatgcggaggctgcggctggtgaggcggacgcgggcgccgtcttggcacgtgatgatggcgagcttctccagggcggggctcctgtcgagcaggaaggcgaggtcccggtcctccatgacgacgcaggagagcaccatctcacggaggtgggggaaggcggcgccgcgcgggacggcgcgggtgtccgggaggcgccagacgccgacgtggaggcgggtgagggaggagcaggcgaagagcgcggccgggaggcggaggtcgagcggccacgggcggttgacaaacactaggtcctggacgcccttggcggcgagggcctcgagccagcgcgcgacctcgccccggtgcgcctccatggaggtggtggtgaggtgcgcgcagcggaaggggcccgggtgcgcggcgaggacgcgggacacggcggcaacgacgccgccgccgccgcgtccctgcggtgcgaggtgggcgtcgacgagcgccaggggcaccgagtgccagacgccgcgccagcgcgtggacagcgcggcggtgcgcgcgccgtccctggcggggaggcgggacacgacgtcgcggaggagctcgtcggggaggcggctgatgcggtcgacgccgtcggcgggggcgcgcgcggcggcggcgggggcgaggcgcgggagggtggagacgggcgggtccgggatggagtcccccacgaggacccgcatcagctccatgccgacctccagcatctccggcggcaggccgccgcgctgcatggaggatcgcatgtggtccatgctgacgccgacgagggcctccttgccgagctccatggtggccggcggcggcggcggcgcgcgggagggagggagggaggaggacgcgagggtttggggagtggagtggagtcgtgtggcgtgggagtccggagtggagtgggaggtggagtactagcgaagtggcgtgagagcgagagcgactactcctgttgttagggttatgtcttgttttgtcgttttgtgttgatgggccaaatgtccgaaccgtgtcgctctagggcccatccagaggttgcctatgttattttttttcttagtggtaataaattagtagtacgccacaagtggatgtatttaagtactacctccgtttcacaatatatatctaatatatatctagattcattagcatcaatataaatgtaatataaatgtgtgaaatactagaattacttacattgtaaaacggagggagtatttaatagcaatcctaattaacgcgtgctcgctagggaggaacgtcgcacgcagttttcgaccacatgacgacaagctatagttagggttagaacttcgagagtgtggtggagggaaagtggcattagagagaggtaagtggggatcgggcttagagggagggcttgtgaggcggcggaccggcgttgggtggcaaacaagggcgagcaatgcggtggcactgtcgcggagccacgggggtcagcaaccggtggagggctggtgttggtggcagggtaaagcgaggggaaggctgtgccgggcaggggtgtggcgacacgttgattcctgttgatgctggctagccaaagctaaagatctcgttggtgaggctaggacgatgacacagtggggatcagcgtcgaaaaagaaggctaacctggttgccgaagaaagcttactagagggagaagggagctcgccggagagaggccttcattgtcggtcaccagcgagtaagcaaaaagaaagagataatgtggagagagaggggaagggggagatgggagagacgcgtgcgtgtagagagaggtgcggcgtgcagacacgtggggagagaggagggcgggcgtgactcagcttcctagcactcgcgcgagatagcaatccaatccccatatttaactacagtaacatgataaatgagcatacacagtttccacttggttgatgggtgtaagctgtcattgcactgtaaccaaatgcaccataccatgtaaataatgacgccatcaacaatatttatatagttttaatatatagtgcagtcaattgtttttctcaaactttgaccaataatatttattcaattacatgtaaaataaagtgaaacaagtaccactagctctgtcattaaaactattttaagcgtgcctggtatgtttatctatttgcacatggatatttctaaaaatagcgaatagttagtatataggtttacttaaaagccgtgggatcggttgaaagttaggagcgccacatcagcaaattttgcaaaaaagaccctatgtttttattaattacatattggttcccccaccaacatcgtccgttcgatctcgcggtagagccgatctaaccgtccagctgtggctgagatctcgcggtagagccgatctaaccgtccagctgtggcagccctttctcagccgtgggatcgtcgaatcggcaatcaacggcatagatttcatccggccggaccaaaccctagttaacttaaaagaaagtcaaatgtctcgtatattacaaaacgaaggtgataaaaattgatcagccttgtgacctccacgatccagctgttatgaacacgcaacaactgcaggtgcaggaatatgacatgctgagagttcggcacacatttgctcgccgtagcacacagggacggagaggtctagctcggtggccgtcggtccccgcacgccgacgcaacagccttgagcacgtaggaaaaggtttagtgccacagttatgccttaccacactttttcaatagtatatcccacatgtacttaatattttttaccaactttgccacactttatggctagcattttatctaccacacttttatgactgccacaacttgcctaacgttagttgtggcaaagtgtggccaacaatccacattaacgttacataggtgccacatcagtctaaaccactatccaaaccgccttgcgactttatttgcactggttttaggagtgcactggttttaggagttgagagacgcatcatatctggtattatgatttagggatgaattttagacttggggacaatttgaaggacctaaagtgaacttattcctccaggccaataatcccggttgcttgcaatgtggattcgcgggttgacccactaacaaccttaaatgcaccaatcaacttctacagtgctatagcaaagttagcaatatgctgccggccaacatattcacaattcaacggctcttgctgctgctaaagcatacggaagtataaaacaaagatagaaacttagaaagaaagaacctgcaggctgtggctctcgagtatagacgcttcattcaggttgtcagcttagcaccatcagatatcttcaaggactccatcgcctccctgcgtacatatatacacggagcacgtcgtggcacaacaggttagagcgagctccagcgtctcaagcttccgtaaaatgtttgcacgtgttgatcaacaacactagaaaccatataggttgaaggtttactgaggcacaggatcgaaggccagtaggccactcactaccatcacaaactagaacacgcagatatgcagtaaaaccgtaaccagagatactataccttagagcgttctcaatctcagagttccctgggtccattttgaaaccatcgaggagagcatcacacgccttttggtattcctgcatatatacatacggagtagggtgtgtacagaaacagatttgcttcagattatgaaggggaaagaaaaacgatctcaccttcagcagcattagagctgctccttggcgatagcaggcctttggccaatcaggccgcatcatcctacaagtataggcatccccataagctttgtctccatcacccatgtgaagaaagcagaggctcctgtttgaatacagggttgcatcattgaagtcgaggcaaagcgccttcattcaagcacaatcaagtgaacaattactacatctgccacacatgaatataacttcatttagcatagaagagctactgttaaggttttggttgcaattttttgggggtaggactatatagaaaacaattaacatatgagcaaccatggagaacgacaagatagccaaagtaaacaatcttaaaatcagactggagatgcgcttctagcgcagttggcacaaacattcagtgtgaacgttgcagccagggttcgattcctgaactcctcaccttccacctggattaaatgaagggttggaaaatatgtggctcctatcttaattacattggatggctagctccttctagccatcccaacaataaaatcagactgcagtactgccgcaattcccagaccttgttggcttgcaaaatccagctgattcccacggactctaaaagctggagatgcgtcatgactgcctttaaacgtttggaaatgatcataagtaggtgtaactcgggtttcatatatcacaagcaattactcggtgcttaaacaaatgtcagtcatatgcactcaatcgatgcttaaaacagaagtcagacaggattgcataatatgccccaggctgtgtttgactacctaggacactaggaactcatattatcaatgaggtcattttggcttacctagcgaaaacatggctttatgtgccaaaaatataagagttaagctgaaacgttgtgactatcaatcatcatgctgaattctctagatacaaggatttccatttgcattttgcaaccagagactgatagtaaatggggaactgtaaccttcactgtgagaaatattgtagcaatccaagttgaagttccaactgatacgtgtaaggttaaaagtggaagaagatgaaaaaaaaaaagtactccctctatcacagaatatagcaacctagaaccggatgagatgtatcctaatactacgaatctagataggccgactataatgtgtcccatctaaataggttgctatattctgggacagagatagtaattagtagagaagatgtgcaattatataccttagtgtataggtctgatgcagcaagataatcctgcctcttcagtgcctcaactccttgtaatttcaaaccagccacttctttttcaaggccactctcatagtcctgaatcaccgaatgcaaataatgaatacattttatggaaaaagatacaacaactagcagaactaagtacctgagatcaaagatgaaatatgcttctgcttcaaataagaaatgtgaacatttttacatgaatatactgttagagtatatggtagttagagtcatattaggataggattggtttgtttggattccttccatatctgtaatccttccttatctcctccccatgtactcaatatatatcggccccctgaggctcaatacaaaatgtgtcccacgttacgcaatatacctctcctatactatccaacatggtatcagagcgggcgatctagcaccgctctcacgcttccgccgccgccgccctcgggagtagcgatctcccggggacggccacccattttttcttttttcttcctcgtcgctgtcgtcgtcgtcttggagagatcgatctccacgactgttcttcgtcgagtctagtcgtcgtcaagcagcagcaacagattgcatctcctctgccaacctccgtgcgcggcgctcttgtatcgccgtcaggccgcccgtcgtcggcttcattctcagcgtccgttctgctccgccggcctcaccctcagtgtccgttctgctccgccggcctcaccgacggggccctgccgtcgtcgtcacctccactggccgacgatcgcatcccgatggacagacgaacggcgcagctcggctccacctccggcaccggtctccccctgcaaccccggcttcctccctgttcgtccctcaccggatcacctcgcccccggccgagctccgcctggttggatcccggatctgcatcggcggcgtcggccaccaccgcctccgactcctccgtctccagcaccaccgtcgaccgggggacgagctcccggcgctgcttctccgctgccggtcctcgcctaccacctcgcctgtcctgccgggaccatcctccgccggctcaccggacgtccgccgctcgggaccactaggatttgaggccgccggtgccagcgccggcgctcgcggggcactgggtcccctccacccggcgccaccctgtccccgcctggaggctcgcggctgttgccgtctcctcgccggccgagtcatcgtcgaccttttctgcctgcctcgccatcaatctgctgcttcatgtctctcttttctatctgtctacgcgtgtgtggatggataggattggggacagggaaaggcagtggatggaccggtcaaaggattgctacttgatgactttggtcccttctgtggtgcacaaggtggcgtggactcaccgcctcgtcgacatccacgcatctccgacatcggcgtcgactctgcttcgacttcatcgttccgcctcgcgcatattcggcttgatcacccgttcaagcgcccggctacgatttctgcaaccgatcgtcatcaagcacgcgtctaagccatcaagctttggggtgccgctgcgtcgcccccctcaggccacagtgtcgctgcctgtggtccacacctccactggttgttgcagtgctgagaggcgccctcctcagcatttctacatcaccggtggacttcttgccgctgcatcgacatggagctgcagctgtgatgtcctctcggaccgcagctttgccgctttcgtcgtcttcatcgccgttcgcgcatcgacaacctcgtcgtccgcactggtcatcgttagccgctcagggtcttcttcctctacttcgagcatcgccgccgcatctccaatctgccactgttgccactctaggccggtggtgcagctacctctacatggctaccgacgtcgccatccaggccgttggtcccactacttcgccttcgtcttcgtcgccttcgtcttcatccagcatgattcatcgcccgtatcttcctcgactacacttcgctcttctccgacaattctccgtctatgccgttctcacgccgcgaccgtcattggcgtatgattcatggtggtcccctacctcacccgcgcggtattggcaacaccgttgcgcgcgttcgtcccgagttgtccccgggtctggcaaacccgacgtgacgtctcgtccttcacggttcgactacatcagctcttcggcgtcatcttcctccacgatcgccgcgattgtgtcaccgtcttcgtctctaacgcgtctttgcgcaccattggtccacgacgcccctcccgtgcgtccacgaccactctacggcgccccatgcgcgcctgcggctcggctacctcgacatcagcttctctacttcggctacatcaaccacggctactctacgcacggcttcatcgaccacggctccctcgcacccatcgctttgtctacatcgactatggcacaaagggctatcatccgtgttgagcactcttgccggtttcttctccagtccaagtgtctgcgctgctcacgcttggactgcggggggatgttagagtatatggtagttagagtcatattaggatatgattggtttgtttggattccttccatatctgtaatccttccttatctcctccccatgtactcaatatatatcggccccttgaggctcaatacaaaatgtgtcccacgttacgcagtctcctatactatccaacatatacaactatttgtataactccctaaaagcattatgtttcaagtctagcatccagtgttatgaaaaaaaaaagtagaagatataggtggtgcctaggcacttcgcttgtaagagagccaagagtgtgaaaaggattaggagtaggaggcaaatgcggaatccaatggctgtgggggattaattggtgattgaacaaccgagaaggctagtagggttagcagcccatgaaacttagtcaggccataaagagtacttgggttaggtatttcttactagcagctgccatcatttttctctggcagcagcagctcgagggtggcacacagcaaccaaaagccgtggcaatgcagctcgagggtagcaactgagcctccctgatccctcttcttcctaacatgtatgccctgagtgcactgtttttattttattttgcgtggccaacaaaaatttgctacctaggcaggctaatcctaggtacagtctgcgatctgactagcaattagcaccttggtgaaactgctagcaccaaccacaacaaaaagaacatttcaacaagtgggtgtgaaaacatgaaccagacataaaataaatgaaaaattccatcatcacgaacttcccaaaattcaaggatgaaacaaaaaaaattctgaagactttctaaagccaaatcaaataccaatttgcatactgaagttattagttaaagagagatacaatattgatgccacagttcatatagtaccttttgccctggcagtgtgttcacatgacggattattcctctgacactccaatcaggtacagtcggcataggagatgtcaaaggaaataggatattgacatctttcaatgtaccacatcgcacagcaaattctattggcatcctgccgaactgctcatgatcaagaaaatatgagttcataaaataattgcaatttggagggcaagaaatagaagcacaagagacaataaaaaacatcagaacttcaatgcaataattggcaacaatctagtctttgaagtacttgagaaaagtatcaaagtaatttactcaaggaattaccaaatctaatatgacaaaaggagttcaaattattcaataatcgaacaattatgactaaggctgctgcatgctaaatcggtgtatccatctgatactatggttgctgcaattgtcttagtcactaatgggataaaaacgtcataaattgatttgataaatgtttaagaactgcgaagcctaaaagagcaacatgttcagcaatgatttgttaaaacaaaatatcttatatctttaggtaaataaggttggtgaacatgccatcaaaatgatgggaggggagaacatacttcatcagggacattaggatcagcaccggcctccaataagcacttcatgatctcagttgagccaacagaagctattaagggggttatattaccaacaccatttacatcagcaccagcctaaaccaagaaaaaaatgttgggttgcctcctctaaaataaatatcctaattaataacattgagaaatgcagtgttgtacaaatacatctatttcctctgaaattccaaatattatgcctctctttaaagttcaaatcaaaacgaaatatctgaaatatttttaagtgcatgtgcatcataaaaaccttcccatggtatttttcttaactagtcaaatgcccatgtattgctacagaataacaaaatggatcacgtcaattgcttgtgacgcacatatagcaatgcaactgtgaaacttagtggtgcaccccatgaaattatttaccaacataagctcatttgaaagcaaaaataaggcagcgtgtactcacaatagttaatatgcactaatcaaaagaatatgttggctatctgaattcatcaaattatccttttctttctcgtggttggtctgggttgtcatggttttgactgcaccttttcaaggttacttctttccttgtattgtttagttttcctactgggccaaagtagttttggggagtttgcagggcgggcctgaccctgacaaggcacagctggtgcagccatgcggtgcgtgcaacagaagatgggatttgacctatttgttttctcagtaaccagctttttttggtttttcgggaggggaggaacgcccgatgtgtgggaggtgcagatggatgaaactcccctttttagtagtagacatataatagcaccttccccatagtactttttttttttaaaaaaaaaatggtcgcccttcatactctgctgattggtggcagtttcaggatggttaggagcagaccagcataaatgggcaacacatgtaatctgtagccagctataatcatatcacaaatatgaaattagaatttccaggagatacatgttgaatttccccatgaaatatttgacaccaaaacattctagatgatttactccctcttcactaaatataggtcttgttggacattggcatggtacctaatcaactatcatgaccattaatttctgttgctccctcctgtcatagatatttgacttttagggcaaactttgatcaactatcatagtacttgaactttaagtttatgaaattatggtagcacttttctagacaaacctaagcataccttttctttggggttttaaactaagcattttagaagtcattgatggtcaaagtttcaaattttgaccaaatcttgtcctaattatcaaatatttatgatcggagggagtaatatattgttgtaaatcattaaaaaatattatataagtaatttcaaaataaatctagcaataagaaattatgtggcatcccaatatcatctgacgcagtcaaggtcaaaattaagaatgatttgaaccggtggattcgagggcaaccattatttagtggtgtagacagtaaatcccaaggaacaagccacagtaccttaatcagcagctttacacatttcagtgatgaaccataaatggcgacgaggagaggagtgtagacagcagatacaatcttattgcactgcaaaaataatcagttggccaaaaacctcagtgacaaaaggaaacaaagacacattataatgtaaacaaaaagataaattgatgaaactagaaccgcaatgctcactatacagacttcagagacttgaaaaggggtaactactctacaaatgttatctatcaagggttgcgactgtacttgaactttgaatttcttatgattttaaacaatagtagtgtagaattcagtggaagaaaaatcagtgcagcctccatgaacaaatataatatttatgagtaggagcaagccatgcaatgccgttaaaccatgttaattttatcttacaatggtctgcagtctttaaaaagagtcgggagtgatggtgcactctgcacccatcccgtcaatagaaaacatctgcgtggatggatctacatagacatgtgcatgatatctctccaacttcttttttgtagaaaaatgtattgcaaatgtgcatattatggaggtagttgaccaatctcctgtagttgtgcaatacacagtattgaggataattatattttctttgcatctttacgtttagatttcatggtatatttattaggctgggtatatttattaggctgccaacacaatcggtgggcattacgctaattagaaactaggaacatgaaagcaaaaaatggcatacatcagcattgtggtccaataaaatcttcactacacgatgttgtccattagtagcagccagatgtagtggtgtaccacgaacagacatcgaatcaacttgagcccctttagcaagcaagagctccactacattgcaatatcctgtaaaaaaagaacaagaaatttcaacgggtatcactatgcaagatagttattctatatgatttacttttcctgataacatctgctagatttcagtttgcccttaacatatgtatattagggacataaatgatcaaggaaatataaatattgcattagaatatctattctgagccagaagaaatgataaacaattcctggagaagtacccatgggcaaattttggatattttgatatctgtaaatcaagtaaggagcataggatcaatcaatggcaaatagtagtaacactttggtatcacttttcttttgaacacgcaagagaattgtgtatcatttcattaagagaagaaaaaaaaggacaggaagtgagcagtgcccaccgaccggatccaaaacaggccgtagcctttacaacacacacaaaaaaccccacctccgaggggctattggcctatcaattaactcctttagcctagaagccccggctagcgaccacatgatacactcatttgccactgtttggaggacagtagctacacaagggttagcaccattaaaaacagtcattcctatgcttccaaatctcccataacaccagagtgatgagagagctaagtcctttattagtgtctttgtctctttctctcagcgcccttgaccaccaccttgatgagttggttgtatctgaacctggggctatatgggccagccccatccttaaacaaggtaattgcttcagtggatcattgtgagaaattttatgatatagtcaaattaaaatcgataccttaaaaacgtaaggtggacagttttatatggagagaattagaatagacacccttgataagatctacaacatgtagatagcttgccagatggccatacccagataaatccctacgttcaagggatttggtctaagacctaaatatgcaaataagcacttaggcagcttgttgcccaattaacagtaagcaggtggtcagagttagaccacccagtctacatcaagtcaaacattataagtaccaaaattttcattcattagtaacttcaaaattaacaaatgcttacttactggtgtacaaaaagaataccatggtggcatggtataagaacaagcagcatatatgccacctcacatgtagaaaaactggttttcgatcagttacataaacaaagaatggccaaacagtttatctcagatacatatcataatgttcatttctctagagtctaacacatgaaaaataaattgaagtacagcagacaggcaaaaagatgatatatgcaaaccttcttcagcagcaaaatggagaggggtgaatcctttattatcagctttttctggatgggcaccatggtcaagaaggtacctcacggtagctacatttgcaccattgactgcataagccagaggtgtttcacctgttaaaagcatcaggaacaaatgattatatcaaccaagagcaagttttggggttttagcatgcgtacagtttgctacacatttaccttccatctcctaaagataaaacagaaaccactaatagttcaagtgtgcaacgcataggcctttctaaattatgatcacattacattactaaatgttgattatctaatatgcggcaggttccctttttttccctttgagcagtccaaaatataaaaaacaaactgcatatttttaatcaaggcaaataaacaccataagataatatttagttaatgatacaaaaggtagtgtcagaaacatgtttaaaatgaacactcaataactgttatacgtaccgcccattgacattcaaataaagtgtgcatcggatttgggaaagcaccataagataaaaagtaaggtcatgtataatgtttgcagcacagggactatttggagaacaatgaaacaaccatggaattatttactcaacctttgttggacaactcatgtgagaatgggagtttacatcaatatactgtaaatgcaagtatcttttccctacatagtggatccaaaatatcaggatattcatgcctataccatgcttagttttagtactttagaacttatcttataataataaggctgactaatgccaatgtcttgttggccaattcagttttaagtatatggattttacataagtaaaatctaatatgctatatgaaaatagggcctaacaaatacgacatatcatgtaccaggtagcatacagatgcaaatgcaaatttatgatggcattcccaaaatagaagtataaacgatggatgatatttgtcaactgaacaatgccaactccaggattcaaatgtactacagcataattgtgagaaataaaattatgaatactaatcaaggggttagacaactatgaaaaactgcaacagtgtgaattggcaaactgaagaagccaagaaacaaatgcaagttcaaaagaaatgctaatcaaggggctagacagctatgaaaaccacaacctcagaggaaaacaaaggaatggttatttttcagtcatgactcatgataacatatatattacctccattcccgatgaaggtccttttgagaattgggactgatgtagcagttgctaaaaataagaaaagaagcagccaaagaaacaatcacctttcctaacaatgcgctaaacacaaatttagtatatagatggactctgcaaaaacaataataaaaaaaaggggttgtctatatatcatgtgacagagccagttaagtgagtaccattaagtcaaaattagcatcactgaagtaagcatacaagcactcacacaccaaagcacactatgaatggcatcaagtaaatgtgtacgggtatacacgtacacaggcaaactcacatcagtgatcagtcaatgagaataaatgcatccctaaacaaagcgcaactacacatcagccaacgaattctgaaaataacccagcgacactacaaaaacattagtatcgcccaaattccacaattagcaaggcacaaatctccctgcattaattactgctaccaaataggagtagacaacgacgataggatcacgacccgtgctaaatacaatggcgttcgcgggtgtgtgagcgagtgagagggtgaggaccttggtcgtagatggcgttggcatccacccgaagctcctcgaccaggtacctgcacaccgccagcttccccgcgccggcggcgaggtgcagcgcgcccgcgccgcactcccgcacggcctccaccgcctccgcggggcggcccctccctccgtccagcgacctcaccacccctgcaagaaagggcaaatcatcaagcacgcagcgccggccgaacaacatcaaaaccgaaatcggagggggtgtagagcacgcacgcttgaggaagccgaggtcgccgtcggatgccgcctcgaggagcatctcctgccgcggggagagggggacggggctggacgggggcggccggcggcggcttccgcgggcgggaggaggcacgcgagagagcgacgccattgtaaggttgccgccgctggatgatcgctagggttgacgcgttggccggttggaagaagaatggaagggatcgattggggagtaggaacttggatttgaatgtgcgacactgctactgcctgcctacctaactacagcagcaggaatactcccttatgctacggggttttcgactagtatttgccacccttaaaatgttaactttggctgtgtttaaatccagggtgcaaagtctttgcgtgtcacatcggatatgagaaaatggacatttcgccacgttcaaaacgcggtttcgctagaatgccatcccgaaaacgtgattcgataaaatgccaatatgaaacgtacgtccaccgccactttgccattttcaccattttattcattttcgaaaagattctctcctctactaattgttgagacaaaattgccccttatcaacttagagaacatggtgagagaggagacaaagagaaggggcggcgacgccgctgctgtcagccggcgcgccgcctctccacatcatgcgcgggaacatcgtgcgcgtccgccgcggcggcctttgcatgctctgcccggcgacggagcgggtgaccgacaaggagatgatgaggggcaccaacgcgccaccggcgccgggccgggaacaggatcgatcatcgacgaggccctctgcctgatgaagctccgcgagaacgtcgtcgactcgatgaaggccgacctctacacccccatcgtcgccgccacccgcgatggtggagcagaggcgaggggcgggcgccggcgtggtttcggcggcgtcctcgtccatgaagtcgacgtcataaggggtcgaagtcgaccgcctccacatcggcatctcggcggagctcctagcgcaccgccagcgtccgcgccgacctccacccggtctttgccttcctcaccgatgacctcggcattcacgaccagctccgcccggcgctcctctacctccgccgcctcagcttccacgacagccgtgctccacctcccgtcctcgttcccgctctggcgcgccatccccgactgctccacatagtgatccgtgcccgcctcgctctccttcgatggcgacctcgtcgcctcaccgaccccgccagcgagcctctattctccacggcgacgacagcaagcaatgctctcgcgctccgcctcaggcgccgcgggcctcgcggcggctgcctccgccgcggtgctcccctgccacaggcgcgccgtcggccggcagcatccgacggctggtgctaacgccggagggccaggcgaagttggacacgccgcctcccggccaccgctgctccgatggcgtcctcgagagagaggaagaggggaagaaggggaaaaagagaggtgagagtgtatgacaggtggggcccacgtcagggttattttggtctagggaaagcattccagtgaaaaatgatttcgaaaatgcacaaaatggccaaaatggcaaagtggcgatgagcacacgtttcatattggcattttagcgaaacgtgttttcgggatggcattctagcgaaaccgctttttgaacgtggctaaatgtccattttctccatcggatatacagacacacatttaaagtattaaacgtagactaataaaaaaaatgacagaatccgcccgtacactgtgagacgaatttattaagcataattaatccgtcattagcaaatgtttactgtagcaccacattatcagatcatagagcaattaggcttaaaagatttgtctcgtaatttacacgtaatcagtttttttcgtttatatttaatactccatacatgtgtccaaatattcgatgtgacagggtgaaaaattttgtcagggatctaaacaacgcctttgatatttgccatcgaagagagaatatatattactcgtgtgtcctttttttttaagatcatgagaagccatgtcaccgatctgaaggcaaaatgaccatcttgcccttcttcccttccacggcctctcaagtctcaatccctcccattccttccctctccatggctggcgaactgtttggtctctactctcttaaaatataagcgattttaggtggatgttagagatgcaagcggggcgggcacgcaggcttttttgtctcgcttatcccacttctagttcattttttcttctaaattttatactaccatgcgaaaaatagacaagcaagcgggtttttatgcgggtagcgggactacccacttgcatccccagtggatgtgacacatcctagtactacgaatctgtgtcacatccatccaaatgttcttatattttaggacggagggagtaataaggatctccacctgttccgcgagctttagccgtcccttcacttgctcctgtaacaactccttcaaacgcgcaggaggcgaggatggccagcagcagtcctgtcctatgaggacgaggtcggcgaggggcgaagcaggagtgcctcgagactggcggtgcggaagtcgggccctcgacaatgagttggcggtggctctggtgctagaggatatcgcggctatggccatcaacatggggtaggtacccctcgacaacgagtcgatgacggcagcatggtgctcgtcgatgctgacaacgaggttgtggcccacgactatgccctcggcgtggagctcgcacggttccacctagttcgtatgccttcatcagcaaggacctcgctataggagagggagaggatgaagaaggtgagtgaagggaagaagaaagtttaagtaaaaaaaaaagaagaagaaaggaagaagagcaagatggtcatttcatccccagatttggtgatgtggcttctcataggctaaaaatggcacacaatcaagaaatcttctccctccgacggcaaaaaaatcaaagacatttagaaagatggcatttgagaataccccatccagaaaaaagagtgggaaatagtccaaaaaccccgcatctttacttcatacttcccataaaaattaacctctgagattaaatatgattaagtacatgccgttgtctatttttgagatggagagagtaagctgcagctgctttgagcatgagatcatgggtgagaacttaaaaatgaaaatggaacgattttgctataaaccaatcatttctaaattttactacattattatgaaaattatcattatgaaaattactgtattcctaaatatgcaatatttcatttctttatttaattcataatttagatgctcatcgactcctcaactaaatcctacttgtactcgtaacatttcataatttacatagtgtaactttaaatttagtttatcatattgtatatttatgcacaattaaatgtatgatttcacattttagtgttttcgatcgacgctgacatgcttccatccatatagtcctatattttttgttttccgatattttctataccgtctttcatttttagctttacaattgttagagtttgtgtcgaatatgtgtacatagtcggttacagtttagaacttggagttgtactaggtatatgactagagtaagagtcggactctgtcctaggatctctcataaatagagtgacgtgcctgttgtaaccgcatggcgacttagcatagcgagagggagcgactgccagcggcgaccggccgtgagtcgtaactctgaaacgttgtatatgctggatcgaggtggagcgcccgtaatcagtgccccggagatgtagggtacggctaaactacgttaccaaatatcgtgtctcggtgtcgtcaccgttttggatctcctatggcgttttcttccgcgtttagctaccgatgtcgattttggggttggttttataacaagtggtatcagagcctgcgggagatccatggtagaggtacgagggaggtgctccacgccgcgacgactacacagggtgtccagggacagacatggacgcaaggtagagcacgacggcgatcaacggaatttgatcggtggaatcgaacacttctggcggcggccggaaccatcaatggctgcttcaacagggagatgaccaaacgtggtgctcgggttgatggcggcggaagcgattggcgaatcaatcggtgggtcggacacttcgggcgggtggctcgaacttttcggtgagctactctcgacagggagacgtgcggccgcacactcgggttgattgaagctagaggcgatcggcgttcttgatcggtggaatcgaacactgggccgggtgtcccgggcctttcaatgagttgcgttcgacagggagacggctagacgtagcgctcgggtcgttcggcggctgggaagatggcatgtgatttgtcggcttcggctcgcggctagattgacaggtggtcaatcggagttcggagcgggttgcgggtcgaggtggagccgcaaaggtggcgcaagccacgcgtggagcctctcctagaggctgttttggatgtgtcttcaacaaggtgtgcaacagaattgcttcgagggcggcgtacgtgcggcttgggtgcggattgggctgaggacgaccagatcggcaaattgggccaactgtatcgtggaagggaccacctatatatttgtcgacaaattttttctaaaaatttgacagatgtaattatagtacaatcgtagtgtaattacattgtaacttatatgtaattacaccgtaacttgcacgtaactacagtgtaacttgtatataagttttatgtaattttgaatctttagatctattataagatttgttttggtgaggaagaaaaataaaatcatagcacacatatatgtgtaaggatttgttcccacaacatattacgtagagatttttgaaagttacatacaagttacactatagttacagtgtaattacatgcaagttacagtgtaattacactacgattatactgtaattacatctgtcaaatttttgggagaaaatttgtgtagcgatcgtcctattccacttccgaggtagaataccggtctacggctcattcctcagtaagaacgtaccaacttaacaagaaatgggcacaccagagtagcgtagcagaaacaattgtgtagcgaaacccattaaataaaaaccattaaaaaataacttttgccaaaataatcactaacagtaccttgctactctagatcttcataaccttcaactctcagttgatgtagaaatatggaacaattctttgctttgatcttgatcaatcatgtagaacccttcttcacctaattattagctcaacactacaaggaataatatatatcggggatgagtacgaatggtactcaacaagtccaactatagcaatccaacaaatacatgcccatcatccacctgcataatacatatatctccaaatcccataattcaacaaggaatttatgcaagttcataaaacagtatagtaaaagttcatattaagtaattataaaatctactgcatataaggcaccacaggtattagaacctccgataggttcctttcctgccgcgttcgcagtttctacccgaaacagcgagtgacatatcataattcatacactctgcagaggtgtgtcgctgtacccacagacgccttcaacgttttaatgcccacgcccgtcggcgcttgaagcacacttcaaggtgtatgccggcaaggctaaggtcacaagcttttcatcaatcccatatggcaattatctctgcgggtgattcccgcaacaacggtgaatcattggatcccgcaacaacggcgatccacatcatctaatcggattccgtaacaacggcaaccctcatcgctagcccacgctcacgggattcgcggaagtccttaagcccgcaggataaagccattaagaaagaactactaagccagcctgtcccattccaggtcatatggtcgacacgatcgctacggcgcttgaatgccatataatagttgttgtttaaccttatgatgataaatatatgcaactgaacccccatcacatggcaagttcagaatacatctatagtatgaccgactgctccaccagtcaatccaatccatcggcatatttattttaatcatagaaagtataatttaatgcaaggtgatacatatagatttcaattacgaaaatataacaagagtcgatcaaaggtgttggacttgcctgagatacccaaaattgaagaacgaataaaccaacgaagacttccaagaaatccgagataaacgcccaactgaaatagtacaatggagcaaaactaaatacgagaacattgatatgaatgcggtgcacatgatatgtttaacatgaatgcacatgataggttatggacttgcttttattaaacttttattttaagaaagagtagttattttacttaaaataaattttgcttctctagagagaaatatatttaatagccacaagttatattgatttatatataaatatacatctttactttctttgatcaacaaagtagttcataagatatattttgaaggaaatacttctatttggattatgatatacaaagttaagttgtatatcaagattttcaagaacagtgactgtaataatatatcaagattttcaagaatttattttaaagagtttaaaccaattttaaatatattctataataatttcttttgtatctaagctctacttctcaatttctttaatttccaccatctgcagcccattagcaaaagcccaacaaaactcaacccacctaacccaccttcttcctcttctctctttttctcgttcttcttctctccttcacgctctctcccagcgccgccgctcacaccgccgctccacctcacgccacccgctgctccctgcctctggcagccgccccacagtcaccgccgcatgtggacccccgtttttataataggaatcaatcgtgtaaacagtaccatttccctggatcaagagtctgatacacacgaattcatagctgtaataccaagtgcacatacacgagtgtctaatacgaattattacatcataagcccgcaggcgtagtcttaaatcatcggaccgagcggtccggaatacatcccaaaagcagaaatagataagacagcggaattcaggcagtggcatgccattgccataggcaacgaccgtactaagacctactgagcgccatcgtcttcatctccctcctggtagtaggcatagggatcctccgaggcttcatctcccgcttctgattaattttatatttgcaagggtgagtaccaaccgtactcagcaagccaccacaacaacaatgcatatgatagagggtatttcaaggaatggcttcaggttcttttgcataaagctaattttacaattcttttcacaagcctaaaacctagcatagactgatcaaattttagtaccagtgttcactttaaacaacaacggttctgtccaccatccattgtgatcccaaggatagcttcccgccattgaatcgtcatggttttctgaggatgtccaccttccctcctctcgggaagtggctccatcagcataaaattcatcatgcaatatcccatcccccacaagttgagaatttagagtctagccaagtgtaatacatgtcccggtgctcaataaccgcgagcacggctattcgaatagatttggtttactcacactgcagtggatgtacactttacccgcactccgcgactgcccaacacatgagcctcgtcccaacacatgagacgcgtcacggcaaagcttttcgataacctcgcattggcagtatccgcttcatgaacttaaatcctcatgcactctaggcgtccatgtttctagcagtgagaggagttctggcgctcccgggaaagagaagtctcacacacatattaaattatggttcaagttaagttctctctctcacacactcatagcagtcctaccaatggcgacaccgatgtagggcacgcctctcggccctacctcaacggctgtcccaccgtagcgcacctgcctcactcaggggtgaaccatctatgcagggatactgcctccgctcggctatctaatccgctaggtctatacccatacgagaagtgcggttgtacgggggtcgtttcatgcttaacttcatggctcggtccttaattgaccggggacggtactagccttttccagataccacccaaatcctccgtccgccccagtcgaaaacagttgtttaattttatttctcctttcacaaatcgtgtcatcaacatcatggcaatgtggcgctcatgtctccacatgccgcatctcaattaccttcccaaaggtaattgcccaagcatatagcatttgataaatatgagtatgcatgattctagaatagcatttctaatcaattgtcatagttgactagggactcatacgtaaacatggttacaaagacttaagggtaaacaataatcaaggcatggcataatcacaagtaggatgttcatcattgcatgcaattttatttataaacaaaacaatttcgcaattgggatcaacatgttcaaggaatagtgatgacttgccttgctcaggatagtccttattcttgatataattcttgatcaaccttcacctcccggaagttgctgacgttgcctcacgactaaccgatacataaattctataacacgcaagaaaaaccaatattcaaataacaaccaaatatgcacaacaaaatatactattcatgtctactaatggattccaatcacgctaggggctaaggtttcttaatctttctattgtcaacgtggcctatttaggagttaaccaacatagcatttataggatacatatatatttggctaatcggtggtttagtctatcaaatggctatggaaggattatggctaagcatgcatctatctacataggacggttatttactagaggttctgttgtcagatggatttaggatcaatcaaataattacagtgaatcatttgtattatttattttattgatggaagctttacttttactttaattatgaacatattttacttgtcacaataaattataaaaggttaataattatccatgctttgtatgttagagttgtttaggttaatcatattatggttacagattatcccatcatataattttacaatgaataatcctaatttacagttgaactataattataattatatgaggtcaagatttataactagtatttatctaatatacatgtttgtcatacactcactcttaatttaatatatgcaacacgcaaattaatactataccgtaccactataatgggatatatagtatatgtgtaagcaacaatatcttattattggatcatatatttgagtagttgctttttactgtaagctatacaatacatgttgattttaagatggccctgtttggttaactaatggatatcaaccgactatatacatatattctacttcacatgacattgtatcgacaaatttttaagtggtccaaatacaactagctctgtgattactctccgaaacaagttaaagattcacctatgtgtgtttatattttagttacaaaatatgaggctaaactttatgtaaacaatttataagtcatggatttagttatatttggacatagactagtaaatggcactaatattttcctatacacccattaatttgaaggattgattataactaatttatttagttgctacagtgacaagacatgttaaagataattatgctactgtacaatatccatttttattcattggcacactatttaggttaactattatctaatcatttgatattaattaatttataattataaatatattttgttaaatagtgagttatatattattgaaaagcttatgaatttagatgaatttaggttcaagtttcacttaaatccgagttaaaatgaataagttatgctagtgtaaagattcaaatttgaattaatccgagaaattgcgaaaagctactgttcataaacgatttatttttaatccaagacatatccacagccttgtaccaactgacaagtgggaccccgggtttattcctttttcctaccaaattattttctaaagggaaataggaagagctaatgacaagtggggcccacatgtcatagactcaagaccataaaacttctataattagatttttaaccgcccggacccacatgtaatagacactactaataaggattaagaagggggttactattcaccaattacgtggggcccactctaatctctcctctccttcctctctctttcttcttttctctctttctctccctcccggcttcttctccctcctctctcccacggctctctggcgacggcgaccgagcaaggggaggaggcggcggcttactgacggcggcggcagcgacggcggcgcaaggcggcgacgcacggcgcggcactcggcgcggcgcggcggcttcgaggcgacggcgcgacggcacgtaggcggcggcacggtggagagaaagggggaaagaaaggaagggaaggagggggtgatgtgggatggaagggcgaccgaaggggatttatagggcgcgggggagggacggccggctccatggcgatgcgacggcacgcggcgcgtggggcgcgaggcggcgggcgcgcggcgcgaggcgtgacggcgacgggcgcgcggctcggggctcggcgggcggtgatggtgacgggcgacgcgacggcgacggcggagcgtcgacgggacggcgacgaggcgatgggacgacgcggcgcggcgcggggcttggcgcgcggcgatggcggcacgacggcgacgggcgacgtgatggcgacggggcgtgacgcgcggaggggtggggctcgaggcgatgcgaccggagacggcgacggcgcgcggcacgacgagcgcgagggggcgcggcagtggcgcacgcggcagcggcgaagtgacggcgcgcggcggctcgaggcgcgaggcgcgcgcgggagggggagatgggacgggggcgcagcggggcaggggcgcggggcacgaggcgacgacgtgacggcgacgacgatggcgcgcagggctcaaggcttcgacggcgacggcgcggcggcgacggcgatggcgcgcggcgcgagctggcgcgcggcagcggcgcgggcgacgacgatggcgacacgagcggcatcgggcaggagaaggaggagggctaggacggctaggaactaaatcggactcctagggggctaatgaaccgtgctagccggctatttaaccctattttagcctatttcctatataaattttattctataaatcctaatttttacacaaatgaggtttacccaatatatgttttaatttagatgaaagtttaccaaattttaatattacccatattttattcttatatatttttttctattgtattatttaaatgaggtctaattctaaaattagcctagataattttggaggctttgagggttctaaaatatcctagtgtggccctttttattacaatagcacattgaacgaacttatagcaatatattttatacggataggttgaatctatttattctataaatagtatattaagactcggtacaacattaatctaattttaaacactcacatattcttgtttatatataaggattaatttatttatatgaccattattttatatgagtgattttcatgtcatgagtaactcggcgacatgttgcaagtatcgatctatatattccggtgaattacttatttataaacacgatcactatagtggtgatcatcatttcatgtgttcttatatttcatgtgagattggattcaaatgaattggatttaatcttactatttctttagctaattgtgacatcaagctatcaatcatggttcgaatatctaatacctgatttgtaatttgtaatagaaattaatatttgactttactatcttgtgcataattatttgtaggattaaatatattctcataaattatatctattgcttaaatatcgatcttttcttttctttctttgtgatcatttacggtttggcaagccatagcaatcataacaaccagcatgatgcgaaaagttttaaaaagtttgaaattttagtgatttttattgtcagggattttcaggatgttacaccgcagtacccatttaacttgaaatattagcacaatattaatcttatcttaagctcttgaggtttaatagagcaatagttatttctaattatgcatgcatacaaaattatcctatgatggcttcactgagcattgatttaaagaactatatacagatataatccttaactcaaatgcacttgtagatcatcagagataattcttgctgttaactatgtaatgagatagctgatctatacttgaattattctttttaagaatccactaaatttaagatgatactatattgtccaattacttataaaaactatgtcttgagcgcatatgatgtactatgatttaagtgcaggttttggtcttcctcaaaaagctagaatgcttaagcttaattccacaaagatgtatatgcagtcacacactcctacacatactagtatatgctcagattaaaatacttatgccttgcctatctcacttatgagtctttcttgatcccaggtctatatgcacatgatgctctccaaatagataaacagcaattgttctattattaaatcatgaatggccttgtttatatctaatgaaggcagatgcatacctataacttctaatcatactagagcatgcacagatcaaagtagatgccatgttttaatttaatttttcttgatttatctactcaacaatcttaccttcaactgtattctgattttggtgatgatatttcctggcctactgaatcctcttgagcttccctcaattaatcttcctttttgttaattaatttctttgctagtcctaattcttggcatcctgctggaactgctacaggttgctactcctcctagagtttgtttggcacctttttgagatgaaatcccttgcttcctcctgagcttgagctgaaaccccttgctccacttgtaaatcaggtacttgtcctcttgtctcttgttttccaggtacttcttgactgcttcttgctatctttctcgatctggtactggtgattctcttcctcctcttgaagctcattctcttgcttgatttttgctccatcttgcttattgacctgagtttcttgtttcttctaaatctcaagcaagcactgcttcacctcctactcccttgtctttctccctctctctggttgcttgaccacagatgctatagttgagctgtggtgtggttgaggtatagaacttttagttggttatttctctttctcccaatctccactgatttccagccgtggttgcttgctgttgctgggatcttactactactatggctgctgtactactgctctgctagctcgctctccctggctactctctgattgccttcccttggataatacaatgtgatcttgtaagttgtattgtctctccagatgaactactagctactgctgctgctcattgcagccaaaaatggtagtactactgctcaccttggtctctacgacagtatagcttggtttgggagaaatttcacactgagatggttaatttggtggagctgaactagtgactcacctgctggttgtttggtggcttcatgcatgttagacacctaaccatagcatgctcggtggaggtggaatgatggatagaatttactaatttttagtttaaatggaaaatctggtaaagtatgatatgtttgatacttttgcacttgagtccctcaagtttagtaaaattggaggttactatgagtttagggactgatattacactgtaatttgcacgtaactacaatgtaacttgtatatataagtttcatgtaattttaaatctttagatctattataagatttgttttggtgaggaagaaaaataaaatcacagcacacacatatgtgtaaggatttgttcccacaacctctattttactgaaataacatattacatagagatttttgaaagttacatataagttacactatagttacagtgtaattacatccaagttacagtgtaattacactacgattgtactgtaattacatctgttaaatttttgggagaaaatttatcgacaaatatatagcaaaatcgatcgtggaaacgtcagttcaaccgagaggctttgcacaatcgtatgcattggttacaaactgatggcatgcgtcattagcggagttggccggaagtgcagaagcgaaggtgcagaagccgtgagatacgtgaaggcttggaagtccatgtcgcgatggtgtgcgtgcaccgcacgttgagaccaggctagcggcattgatagaagcaacgccaagaggaagcaggctcgggaggagtcatggttgcacaggactccaatcaggacggagccacagtgttggagttgaacacggacaggagttgtctcctgttcggtcatggcggcgtttgtggcaagtagtccaggagaggaggcctagttggacacacacgaaagggaaaaggaagtgggtttcggtttggacttaaaatcggacatcaaattcccaggactcagcaacaggaattaatccacgggattgcagatattgcaatcgaaccaaatcatcaaagcaaaaggagatcggactgggacctcttggcggcagtgatttggggcgacgaacgtcgggtggtaggagcatgacttggtgcagtcgttgtgcaggtgccgacgagtacgacgcgggccggctccggcgaggaggcggcaggtaccggcgaaggggcggcggcgatgctcctgtgtcggggaggcggctcccgtgggcatcggcatcctcaccggcgggaagcccacggcggcggcggcacgacgctctcaccggcggaatcccgcaaggaggcgggcggtggtgtcaaagcgaccggcacaagtcagtggcggcgttttcggtggcggcacggaggagacgatgaggcggcgcgggctcctgggctcggtggctggcggaggagcggcggcagaaacggcgctaggcgctgggcggtggcgcgctcgagccggcaacgagtgaggagcgaggagcgagagcagggagggaaggggatcgttctgatctgtttcctggttttcctgttgactggtttttttttcttcttgacccaaaacgattcgattttgctatatatttgtcgacaaattgtaacatcccgggttttagctatagtcttagtcatgctaatgacttggtcacactggctgagagcggtgttgattgagccacgatgctggctaggacctataaatatgttgattgttgttctattatggatcttaaatgattttttttatcgtttccttgttatttatttattaagttatatccatatgcatcattgatttattgtttgttagactaaacctagtgaggagtgggatcatttagttttggtcaaattatagtgtagagattagtcatcacgaagtggggtacacatgtgtacagtagaaatcacacagttctttattcacaatttaccactgcaggtctgcatacatacatgcatataattgtacactagaaattacagtatgcatcccatatattgtgcatatacatagtgcttatagatataataccataaactgaaccatctcgtcaaagatttaataatcaattatttttcagaaaaactctagataatctatgaaatgccattgacaaacatccaaatctcagaaatgccatcgacaagtgtgagtttcaagaaatgccatcgtacaaacgactttgtcccaaaaatgccatcgccgttagggttccgtccacttcgtgccgttaagttctataggatgaacagtgtatttaatggcgcaaaatggacggaaccctaacggcgatagcatttttgggacaaaatcgtttgtacgatggcatttcttggaactcacttatcgatggcatttctgggacttggacgcttgtcaatgacatttcttggattatctcttacatataagttacagtgtgattacattatgattgtactataattacatctgtcaaatttttaggagaaaatttgtcgacaaatgtataggtggtccccattggtttgtcttgttggctagaggatgtgcacaaggaggtatgatgcagcaaggcaaaggtggttggttaagtcaaaggcgtgactcagcggaggcaacacggtaattggcgagaaattcccgagcaacagtggatgaaaatcgttgagggcgtcaacgggctgtttggcagtacatgatatatccaggatctgcggggattgcatgatggggatatatggaatctgcgtcactgaagaggaagagcaaacgctatggtggtaatttcttcgggtgattcaaggcaacaatgatcttctcaaattatcggatactcagtctatggatgcggaaagcgtggatgttggattcgttagttcggttcataagacgacaataaagggttctcttcatgtctggtgagtttgatttatctatttggtgatgacatcggtcatctggctatggagaagatcaagtcaaatttaagacggaagatgaaggtgaacatggtattcgggaagtctatgatgtgacagctaggaaggaatccaatttcgcttggcaagacgattgtggtgatatgagagtagatggagcactgttgcaggtggagtcaggaggaagaaattacagggatagagggatagcgggagtctcttgtttacggtgagcctggtggaggcttgtcggggtagctcggtgtgagcggcgaaaaaggatcaactcaagtcctggtacacggaggttcgaggaagtaacgaattcaggttggcgtggcatattcgccaaggtggagtttgttagagtttgtgtcgaatatgtgtatatagtcggttacagtttaggagttggagttgtactaggtataggactagagtaagagtcggactctgtcctaggatctctcataaatagaggggcgtgcctgttgtaaccgcatgggatttagcatagcgagagggagcggctgtcggcggcgaccggccgtgagtcgttgtaactctgatacgctgtatatcctggatcggggaggagcgcccgtaatcagtgccccggagatgtaggctacggctgaactccattaccaaatatcgtgtctcggtgtcgtcacccatcagactagtcttttgggttgtgtaggcccaggacctaaagttgtggctccggttgggcctgtggtggagcaggcccaacgtgacatgggtggcccacggttggtgggccgagctgcgcactctaacaacaatttcatccatataattctatcttcggttttccaatatattcaataccctttttcatttttagctttaccgttttcgatttcgttaaagaaaaagggttataggaatggttgagatgttttcctaccattttcattctacatatgagatcaactttagctcaataacttcaaattcttattctaaattttagtaaaacttagtagttgccctgttcttccaaaatattaaaatggattatttttctacacttatttttttaaaaaaaaatcttgtactgcgtggcttaagccacttgttttaaactatttattagtttatgtcctaaaatatttaatttattcccatagtcaaacagataatccatagtaataaactaataatccacttaataatctaaatcaaacagacatacagatagggactaatgaaaacccagtagcttccttcaaaacaagatgttccaattccatattgtggttatgttcaaacttcaaacacgactgtgctccttgcaaataacaaaggcactgataattatattgccgtgaaacttttcctttgcaccaagcatgatggcatttcatttcattaccagatcgatcacattttatcaactcaaacatgtcataagaacattcagtcttaaataaaattgtcataagaacatccagtacatctctggtattcatacattccagctaccaattcgaatattttccagatgctaaccccagggcacaagattaacttcgtaatgctcgtcagagttatggacttgaaacaccgtgatgttcagcagtcgtccacccgttggctacttagctcgacttacacaaaaaaaaaaagaaagaaaaaaaagataaagaaaaaaaaggagatagcccattctgggtatcgaagtctctgtgcaaaagctgataacgcaaaacctgtggattcagcgaactaaaggctcttctgtgcaaaaggtgagacgcctgtggacaacgtggaggaggaccagaactctttgcccccctttgcaacacccatgatgtttcacctagcctccgtgcttgcagatgtcttcaaggactccagagcttccctgcatgtttcaagagctaatgagaacatgcaataatttacaatgggttcgcgcaccgctagatgcagcagccgaaacatttgttccattatctaaaaggaagagaaaaaaaaaaacataatggcttcacaacttgccagtcttcaagcgccatagtagtaaattctatgatgagaaatgtaatgcatacctcctttttagtttaaaagagttacattaggaaactcattggtgggaagatcccatactacaatgtaaatattgtgcattgtgcagatcaagagcaagttttggtagttaagaaatggatggcatcaatatagtaagaattgacttccaaaagtcctaacaaactcctacataacagaattgaatgcaaataatcttcacacccacaatttttcaagaaataaatctattctaaacctaactacaacataggaaaatttctagcatacaagtgaaacatggaatggccagataggcactagccaaagctatcatcataagccatattgccataatgcgaccaaaataggcagaaaggataccgaaatgcatcctcaatctcagagttccctggatccaacttgaatccattgtaaagtgcttcgcaagcactctcatagtcctgttgatagaataccaagtaaataatatcaaagaaaaatttgcagaaaaaacaaaaacatggctaactgcatcgtctatatgttaaccttcagtaacatcagagcagcacccagccggtagtaggcctttggccagtcagaccgcaacttcctacattcatgagcatccagcaaagccttgcctccatcacccatgcgatgccagcaaaggctcctatttgagaacaaggtagcatcatcagggtaaaggtacagtgcctacattgaacaaggaaaacatgggttagcagatttactgagaacataagaacagctatgaatttgcaatcgataaacaagaaatttgcacattaacacaaccacactagtataaaagaactggttgagtcagctagacaactaaaactagaaatgagagtatgggaaacaatggtacggtactgtaacacttacaaaatatatggaatttaaaatcataccacttttggatcaacaaatcctgttcactagtttttaatcctccttgaaaatatggagttttaagccttttttgtaagttcgatctagtttctctatgtttaagccaagtcaagcaactccacaaaagctctactgtagttttaatgttggataggagtgacagcaagaacactgagaatctcctaaaacaattgcactactctcattagtacatattctctttctgttatgataaaacaggtacacctcaggagagtatataaaaatatcaatattgtttctacatgaggaaatgcaccacataaaagagcaaataaagatagctaggaccttggcgcactatgggcacaagcaccaagtttttgctacttccccctgcagtggcattgccaaaattggcaaaattctggggatacaaacaaaatagctcctatggacattgaaaggaaatgatgttgccaatatattgcagaaatgatgtggtttttgaaaggaaatacatatcttctcctttgcaggttatcttttttattacacattggctccgctcatgggctatcctccagaaggtcaatttgcggggtactatcattgcagcttgtcaacaattggagctagtggccctggagttttctaccccggcacatgggtggcgttctaggctacggttagagggctcctgaagttccttttgttcctgctattttggatgatgagtttatcttttgtttctttcttgttggctgtatgcactctttgggtgcagaagctggaggtgctctcagaataattgtatgaaatttactgagattaataaagcttccattatctaaaaaaatggacattgatatatatatttttgcccagctccagtcaaactttgtacaatggaatagcatttttctactaaaagaatagatgaacgagtttgcattcaagtataagcaaagccaggtcgtaaccttcatacactgtatgcagggacaaattcaaaatagagataaacaaaatgaggaaacatggtgctctgatgtaccttactgtagaatcctgttgcagatagataatcctttttctcgacagccttattacccagtgactttaaatctgttgctttccttttattgacaggctcaccctaaaccaccagttatatcaaaggatgaagacttgtgttatgcaggaaaagtcctaacaacaagcagccaggtatatttatgcattggagattcaggaaagttgaatttaagcatgtaacatcttcagtcatcatttatatgattccacatgccaatgtttcagtgatagtatcctaatttccatgctcagtctcgtaatagtgacaacttactgcctaaattttaactaataatgatatcctaattcctacagcaactacagtataacacattttactcagacctcatcagccactgagccacactcataatgggaaagatggtcgttctttcattaactaatgagactgtttcctcctacatttttttacctcctatacatttgtactgcacttcaatgcatcccttaatctggatccagataatctttaggctgtgttctaacttctaactacaagttcccaacttctactccctcgttttcctcacgcgcgcttcccaaactgctagacggtgcttttttttttacaaaaagaaaatttataggaaagttgctttaaaaaatcatactaatatattttcaagttttttagctaatacttaattaatcatgtgctaatgagtcgcttcgttttgcatgcaaggggggaagtttccaaccctttctaccgaacacacccttagacggttctcaatcatcggtaactaagtcttgtgcacaattgggataatgaattgacgtggtattccttaatgacgttcaaatcatctaatgcaagtttatctttcaatcacaatgggttgttcccaaaataattaacaagcacaatttatagataaaaatatcatataaaacttgttttgagaaacaatgattgaccattgctgcaagaaaatgactaattcatacattcacattcaattcttaggaagataagacaacttctataattcttttcaattattttaacagaatttcagcacatatgctccctcctgtcaaagaaagtaccactgtagaatatctgcagtccaacgggcaaaccatctttgactaaacatatcctctagagtatgtaggctgcacaaataacattttggatatgtttgtgggtaagagataaacatattcggaatgaaaggttttgactaaaattttttcttcttatattatactagtacaaatgatgaaatatattaatttgcaagatgaactcaatgacattattctctagtgtcaagttgcatctttttgacttttcaagaggtcatgcacacatgatttcatgcactgagcaggacactaatcatgagtgcattttcttcaatattaaatccttttaatataaaaattctcgatgaagcttaacaaatggagtatataagaaaaaaaaacttattttttggtgggtttccatctctctgcctctcaaaatagaaattgtctctattacttttgctataccaagctggacaatttgtgccaagcaaactgtcaaagttgtaactatccagagttcttcaaaaataacagcttgcaggcataaaaactatatataattaaatatgggaagaccattccaaatatgcactggcaatttaacaaaatgaatagtacagagtccctataagaaagagaacaaaactatttgaatccatggaaccattagcagagcataaactcaggtacagagcaactttgcagtgtagattagggatttcagaggaatgcatttacagcattcataatagtaatgaataacggagcaactccagaactttgttgaattggaagggaagaatcaacaagcaatgattagccacgaacatgtctttaaccttgaacaagttcagtgtttagttaccaacagaattccaatcaatgtaaaaactgcaatgattaaagtgcatgtttgtagtgcaaagaggtaaatcttacattatcagaaatgttacagttggcaccagtctcttccattaagtaattgaagcactctgtagaaccactgttttcagcagttaacatgcgatcttcactgacaacagcaccaacctatcatataaaataagttttaccatatgtcctcaagatgactaggtatcatttcataatttttgaagtttcataaatgaattaacaactttatgccaccacctctgtgtcagctgtctattgagctgttgtttttatcctacatatggcaggcaacctaatcacaagtaggtttttttaaaagggaaaaaagtttcaatcataagtggatcatgggctacaaaattgtgtagttggtgtagtttttaacaagccatatacagacaaaatatgttgaattactgaatggagcatggagaaaatgtcaaaacttgcaaagaagcaaacaacctgaacatgattgtaaggattgacaaaataaataaaggtagagcaccttaatcaggagatttatgcattttaattcaccagaatccatagcagtatcaagaggtgtcagaccatctaccatcttgttaaactggtgagaaacattaggcatattagttcatatggtcaatgatacaacagggacagaagacaaacaatggacgaaaagataaaacttatagaaccgcgatactgcatcaaacgtgcagtgaaaacgaatagcttctattgcataaaaatataatgagaaagttgagtttgaagcaaacatggaacaagctagtcttgaagaattgcgtacctactggctactagggagtagggacataaggttataagtaagtaatgaacattcaagagtttagttatgccacataatgcaaagtttgttagcaatactcaatactgagcatgaagtgttaatgatttcaactatgaaaataaataaagtatcaagcaacccaaatacaatcaataaaataaaacatgacaaaaaggaattgacaaacaaaagttggcgcagagagcacacgattgaaagcatgcgttttaaggcacaaacggcacgctgtaaaacttacatctgcattgtggtccaataaaatcttcatagcaccatctcgcccttcagtagcagcaacatgaagtggtgtcccacagtaagctactgggtccacacaagctccttttgcaagtaatagctgtaccattccacattctcctgaaaataaacgagagaagccactcattagaagagtttttgtttttgctataacatctatgtttctcaaaagccagttggacctccatttttcttgaacatattccacagaagttccagaaaatagaaaatattccataagatgaagatctaacattggtccgaggaattacagaactgatactgttgaaaaatgaaaatactcaaggtaatgtgtgggcaactaggcatacatttcaagggctactagaaagccctaaaaatacataaagaaagtgacatagcaaatgcatgttcagcagttcttatccatagaaaatacacaatgaactttgtgtccaaaggaacttttagagggcacccaccttcaataaacactggcatgtttaaggaaattccaatgataattaagaatattatgactatcagatttgattaaaactcagtttgttattagctgaagcccgagggaaaaatgttgacgagtgtaaatagatcctagtaggacagcaaaccagcacataattaatctactataagttaaaaacaaaataggcaagattcaagaaaaagtgaaaccggcagatgaaaataagagaagagtgtttatagaggggcacctaaacaaatggcgaaatgtataggggtgaggccgttatggctggctttgtttgcgtcggcaccacgatcaagaagatactcgacagtgcttacatgattgaagactattgcaataatcagaggagtcctacctgtcaagcacaaagaaaagcttattgaagcaaagcaccttcgtatacattaaaggaaacaatattagctcctatttttctataaaatatgcctccatagagttaatggtagcagcattttctgtgagcatagcatctaaaagttgcttatcaagacctcgagataataaagtatggaaaaaaagaaggaaatttaagtatcttatcaagtagaatgtctgggcgcacgagataacatttcacatcatgttttatatgaagtgtaatgaccatgggagcatcacagaatatggaaaatgaagccatccattttaaaagctaggtaaaattgatgcctattaacattgcttcacagtgtcatgcataatcttatcaagcacaaaacagtttgagtaacacctatggtgaagtaaacattgagacatatcgatcaacaaaacaagtaactcgagtaaacatcattagattgatcattacaatatggacacgcatgaaaattcaagacgcattacaatatggcccacatcatttacttttagaaaaagaaaagaacatacttcctccggaccaaaatatagctatttctatcacggtaccttgtcccaaaatgaagctattttttccaacgaccctctcctctaaaccaatcacaaccactctccatttaatcttcagctactttctattctcaaccaatcacaaccttcctcaaatcacacatttttgagacggaggtagtagtagattttagttttttcttcctatgcaaccgcaaaggattaaggattaataagaactaaaatatgtgcacgtgatcatccatagctacgaggaaatgagtagagttctgtatcgggtgagagatggaccttcctggtcagtgtcatccacgtccagccgcagctcctcgacgaggtagcggcacacctccagcctccctttgctggcggcgatgtgcagcgcccccatcccgtccaacggccccgtcccccgcagcctcgccgcctgcaccgcctccccgagccgccccctcccttcaaccagcagcatcgccatccctgcaacggctcgggagtcgggaggcaaaaaattcagcacacacccggagcaccccaaaaagacgaacaaaatcgatcgcgaccggaatcgaggcgcagcgtgcgtgcgtggcgtacccctgacgaggtcgaggtcgccgttgtgagccgcctcgaagagcatgtgctgcatccatccaccggctgcacggggcgaggaggagcggagttagcagagagcttggcgagctagggttttggttgcagggacatggagggagggagagggggttggggaggcgcttaccgtacatggctccgttgaagaaagctgacgccatggccggcggcgagctggctggtggggtggtgggggagcggagagagggttggtaggattttggggttggagtggagaagaaggggagaggagtggggcgtgggttcgaattttgacggaagaggaacgaagaagcggaggaggccgcgggaactagccagggtgggacccagtgtgaaaattgctgcgggtacacatttgttgacacacataaattaggtattagggatacctattagggcaagttctatagtaggggtagttgctacatctaattttatccatgtaagataagagataatatatacaacacaccatatctacaccacctctatcataccaacccaaataattatattttatttgtttatctaatcccctctttctttcatcacatttttcttggggtttgtgtaaaggttgacccttacatgagaggtaactcaccttctctttcctcacttattacttccacctcatcatccaatcctacgtggcatttttaggggcaatacatcaagcatcatagtacttgcccttaggtattgtctcgtccaaacaggataacgtaaagcatttcttttttaaggcaaaatctaaatgaagagtactctcacccctcaatatttgttggatactagcccatgaagcaagcagagaaatatattcatatcacctatttttcaaataaaattttctcttaaactactaatccgatttacgatccgattacactattgtgttcgtaacaattaaatctttattgatctcatataattatttattttttaaaaaaattacaagttacttttataatatatttaaattacttttaaatttcattaaattacttcttagacataaaaactaaattcaataaagcctaaaagtaatttatatatattatagaagtaaattaaaaaaatgtaacttgtcacgacaataaaaacaaatctattgtggggataaaaacataagatgtctagaaattaaatttaatcaacatattataggactaacaaaaaaaagtaaaagatacttccttagttaggaatcataggattgaggaagtatgttggtttaaaaatctctgttggttgtgtcaaaataagtcttgagagaaagctacgtcggtttttttttccatgtaaaatgattgtaaaaatatagcacccattgtttatatttccattttaggactgaagtataaaaaaatactaagcttcatttccacctgtatccaaaacaaaaagaaatgttatactcccttcgtccctaaatatttgacgttgttgatttttttaaacatgtttgaccgatcattttattcaaaaaaaatttaagtaattattaattcttttcctatcatttgattcattgttaaatatacttttatgtatacataaaattttacatatttcacaaaagtttttgaataagacgaaccgtcaaacatgtttaaaaaagtcaacagcgtcaaatatctagggacggagggagtattaaataacaagaaagattctagccgtatgtcgtgaaaagtcatcgctatttccatatgctgttagagtatctcgaacagcctctccaaatcgaactctccaaacacccatatagccaactctccatctgatttggttagtcaaactaattgttcactccaacagcctctccatctaccctctctactttgactctttgacaccaggacccatatgtcagcctctcccttcttctttctcccattccttcccctcttcctcttttctcgcattggcaggaagcaagcggtggcagcaagcggggaggggacggcggtggtgggcacggcggggagcttgcaccacacggaggccggcggccacggcgagcggaggcggcgggccacgctgcgcgggggctggcgaccgcggcgagcgaaggacggcagccgcgccgagtggaggcggcgggccacgctgcgtgagggctggcagcggcagcgagcggaggacggcggtcgcggcgagctgaggctggcagctgccatgctcaagctcctccccatgcctcctcctcgtgctccttccgtgcctggttgccatgtagggatggaggagatgggctgtgtggggcccaccattggccatccaaatagagtggccaaatttggctagtggagggagggttttggccagccggatagcttagccatccggttggagaggctgttggagcacgttttttgactagaatggctaaaatttggcttggagagtgggatggagaggctgttggagatgctcttagcataatgatacaaattcccataaaacaaacaatcactaaaccatgacataaaatccccaacataggatcggtcggcaaagaccacattcaaatacagaccgtcgaccgacttgcatggtcgaaagaagtatgattggcaaagagtttttttcacgacatatttttaccgatagactatcatactcttgttggtaagatttgttgaccaacattagttatgttgtttgacatatttatctagattctcaacaattcctgactgacggtctgccacaaacatgagaattgataacccacattcactcaagaacacaattcaattttaaatcatattaaatttatatacatgttcatcaggattacaaaggacagaccaatatcctcacctaaacaagtgttttcatacattctgtaaaatcaaagtgtgtttgattattattttgtgatgaacaattggcatataagattcttggttttgatgtttagatattattggcgaagttgttttgaagatgattgattttcatatgatgaacatggactgttagttttggatcaatcatatcatgttgtggtagccggtcagaccgacgtgtgttgtgcggtcatgtaacatcctgaaaattaatattccctttaaacctaagacattataattagagggacctcctagaactaacttgcataaaatctctctctggtgcttttccttttaaaagtatatttggttaattgaggcatttcttgatttggtctataaccttgttttaactaaaatcctttattcaaatttagtttgaaaactctttttatttttatgaattatgatccaagaaaccctccaactttacccttgaacctaaaccaaatccttgcaattccaattttattggaattaattgtcgacccattctttacctatcctttgattccaaacctatccttagtcccctttccaaattcttccttttgatctagccgctgatttaattcctgtggcttgatttccttctcggctaaagaatgatattattataaatattgtaaataattgctcttgtgctaagagaatagactttatccctccaccccaaattcaaaacctcatttagcccatatctaattctctaaatttcataccacatattttgggctaaaattctatttactctactccctccatattccctcctcatactcaaaaatattcaaatctagagccatattatttatggtgttgaatattttgaatttctatttgagtgcattaaataaactccatctctaaaatattgcactcaaaccaactagaggaatatttcttttggaaattatatccaaatataatttccttctgaactctctcattcaattttccttcaaattcaaactatccaaatcctattccaaaatttagaaatcaattgttttagtttggactgaaaattcctcttttctcctttcggcccatctccctccttggcccatgtcggcccagctgagcagaggcagccgcccctttcacctttgtgggcgcgcgcccgacgccgccgcaactgccgtaagcggctttgtcaccgccgcccacaatcctgccaccgctgctgccgccttgccgaccacgccaagccgacgccgtgccgtgcacctctttcctcgccgcctaactcctctgcggccgccacgggcacgcgccgccgtcgccgaccaatgggagaacgaagccggcgccgtcgttctctttctcacgtcgccgtcgccatagccatgtctcccttctcccctccaaaccgactttagaaaccgacctccgcggcctataaatagacgatgaggtcgcccctttcctccatacacatccgagcctcgagctctatctttctctctcttccccaatgccggccgctggtcgatctccttcactggagccctgcaggccaagccctcgcgccactaccttcgtctcgatgaggcaaatctattcccctacttgccccttccttttcccctccgagataagccaccgccgccgcctcttttaccggccgaaactgagctcgtattgtcgccgttccggccgtttcaaccttcctctctaccagccaccaacctccccgagtgcgcgtcgaccgggaacacaatatgccgccgacgtcaccgcactttggccactggaagcccggctccccgctcgcccttttctctccctctctctctctctcggctcctaattgaagaggaggaggtgacgggaggaagaagtagaggaggagagagaaagaaaagaaaaataaaagaaaggctgacaggtgggccccagtacagtactatttcacattttctagatttaattcaaattccaatctttagaagcacatatctcctaaaccgtagatccgattccaatgaaacttggacctaaatttatctaaattcaaatcctaccttttgacactaaattttccattttaatattttatttgagttttcttaatttattcaaataccgtttgaatttatgtttgccttttcaaatatttctttttaacccaaaataccctttagccactaaaaagccgccggttggaactttacgtcttctatggggacgttcgtgcggtctaccgaccccgacgttggaccgttggttgtaaagcccggcaaaaccaaacctaaggtcgaagtgctgctcctggcaccccacgccttgatgcgtatagtggtcggagcttcactattccctcgacctccacagcacactgcacagttagctctcgggctctgtgtgatcctagcaaccactcaaggttgttggagtaacacttccgccccactaaacctacaccaacctcctattcctctagtcaatatgttgtctatcgacaccggctagagaagacaccaaatctagtcgttacgctgccaactctagtaacgactagcaaacaaccaaaccctagccgataccttgctaatcaaattccatttgtcatccaaattccataccctctacaatactacctatccaccatactctcagccacctactttctgtctacaagaacctatacataaaatatagaacctggccgatatattgccctacttttcaatcagcctaaatataaccaaaccctaggtataatcctacctaaatcctagccattcttctaccaaaccccaacctcgaccaatgttaacccaataatccctataccctataaaggagatattataccttgaaccctagctctcctagccgcttatcgatcttttgctatcttatggattttattgaatttggctcttcctcttctgtagtagagtctattatactttggaggcaacctgtggtatttcgaggatctgataaccaggttgcctatctcggatttatttgcgttggagcaaggcaagttattattcctcccctttgagcataatattcctatattatatatctccagtatcttgcgcattagccatacatgattttgaatgcataacttgaacatatagcaaaccagatatatgctagattttgcttagccatgcctagttagattgcataaaatataatgaacttagattggaacagtacggtagaaatggttgatttccgggtggctagtactgttccaaccggcataagactgccaagtacatgtgaagaacatacgagtatgaccgcaattctcgtatgggcatagacctagctgattaagttatctagcaaaggtggtacctctgtatagtggttcttcttaagtcctcgcgtaggaggcaaatttatgccgcaaagggcaattatgatatttaccgaggcgcaggtaaatatacttatattgatagtccaggggactatattatggccatgtgattttgtgaaccctgattgcgatgacatggtgtcatacaatcagttctctctaaagacctcgggaacgccagaactcctctcgctgctgataacgttacgatcagagcgcatggggactagagtttatggaacaggtaccactcatgttagtaactgaaaagctttgccatgacaaggctaatgtgtttggcacatcatggattgcgggtaaagcgtacatctactgcagtatgaatattcttaaaactattcgaatagccgtgctcgcagttatcgggcattgggactcatatggcatcttggatagaaacctaattcgaaattttattaaatactgctgcatttaaaacattacaggttttctacttttacattctctgctttctgcaagtaaacctagctttacacagatattatcatttcatacattcattgttgactaatataatagcttgctgagtacgttgtactcacccttgcttcaacccccctttttcaaagtccatttggagtttgtgccgaagctgggagttcagtcatataagttaatttcatttcaacctaattctcaagtctagattagatagatggtttaagtctatagccaaacattagagttaagtaattctatagcttctgttgtattagttaaccacaaatttgtaaatacctatatattttgtaataatatctcctttggagccttattcaaacgtatgcaatgaagatccagattgttgaacctgtatcaatttactaatctagggcttgatacagtctaaacatgtcggtttcagtttcgggttgtttctttggacgttcgtggataattcatgtttatgacttctagatgatcctatgcgtatttagtactgttgtgtgctaacaataagtcaagttggagaaaacttgctcggatatggtttcttggttgatgcatgtgtaggtgagtgttgatgcctcgggagagcgttgccggtgatgatcgggagtcaaattgggagaaaatgatgtccgtatgatcaagatatcatgcgggatacttagactaaagatcaatgcacgtggttagtgaagattccatatagcatacgattgagatattgtgtgcatatggaatgcagagtctgttgatgatattccctagaggcaatcatagagatgattgtatcacatactatgtttacatatttatccgacattgttccttgaaatagataattcgttattggttaatgaatatgtgattctttcatgagactttttttgttgtatgctgttatttctaaaggatccctgatcaaatatcagatgtggaacaaatatgtctaaatgattagcacatgtattgattgatgatcatgtgttatggatcatggtatggagatatcaaattaataatgtggacatttgttggggaacatgtgttggatagacccaacatgagactctacaaaagttatatatgttgtgccatcagtggtctcatttagtattggtatagaatccttacacctgaaattatcatgtttcccaacatatgtagtagcttgcttaggggctgctaaacgctactccataactaggtagttagaaaagtaatcttcgggtatgctatgaaaaatgtagcgagacatgaataatcaagatgggatttgcccctcctatagagagatatctcttggcccctcgatgttattgtttatggaagtgcatagccatgccaaaggtaattgaggagtcaatcgcaggttatataatctatcataagttcgagtgatgattgagctattagacgatggcacatatctagccttgagcttaatcgatatcgtgaggcaaagaggttcatacaagtatacactagaggttcaaccgatatgatatttgggcctgtttgggggagcttaagattctgagaagcagctggttggtagccagcttatgagaatctggaaaagctaggtttcccagcttctggcttctagttcattttttggattctagaattacagcttctcagaatctggaccaaaagctggactgtttgggggagcttctaattttgggagaccctatgtatgcggtgagtcaatacatcctgctaggggccaccattgacacgtgaaccgaaaatgagttttccggttacatccgagtgtacgtgaacctacagggtcgcacgcttaatgggccggagcaacaggattggatggagatccaatataagcttaattcggatagtgacccatataggagtcctacgggccttggaggcccattcatggatcctataaaaattttaagggggtgtgagcagtggattcattggatcacgtgagaaaccctagcagccactcccatccatgagcaaaaccctagctgcgctgcgcgcaggtgcttgcaggtctgcacatagcgttctatccctgtacgtgtggatactagtaaaggcgccgctgtcttgcgatgcttatcggcgtaagaacacggagaggagaacgcacaaggaggagaaggttaagctattgcgatcgactacttcctctacatcgatgcacgctacgtccccgacatttcttttgcttcttagcgcttaattccattgcacaacgcgttgagtggtaacgatctatgatctaatacttgcatagttcctggtttacgccgtagaaattttttgatttatgctattgtagcctatgcgtttcccttcagagtcgaatttgaaaggagtccaaatttggtacaattggagtttgtaaagtttgtttcttctacgagaagggttcctaggggattatgacttcttatttaaggttggttcgtgactttagactgcctatctcgggtataaatagagagtgagggtgtggtctcccgaatcccgatatcaattttaagagagttgagtttagagaaaagttagagtttcgagtttagtcgagattttcatcaaattaaatctcggttagaccaatctcatcgacttgagggtaacttttaatttcgctcaaagtttcggtttttaggtactccaaccattcactctcctctggttggcttagttcttcctaaccgagcctacgcattcattatattgagctaaagacaacacttcaaattaaatactgtagtgcctaccttcaattcattcatagattaattcaaagtggagacaacaattgtccaaaagatacaatttcccacttacagatcatgcaattctagcatatcctaaatttatgtcagctactcaacttcaaactagtttcaggtgtttataatgtcaacaaataaatcaaaatctgagttcaagtgtagaagggagagggtactgaaccaaccacattctgccactaagcaacggactttgtaaaatccaaggcaagagaaatcttatgcccattctgtgaaaaaaatacccatcattctgaaatgaaggtctattattttctgaagaaaagaaatggaagacacagcaagcaagacaactgatatagaagggttattgattaactaacattgcttggaggattattagctaacattgcttggaggattattcgacacttaaaaaggtatttgccggagaacatcataaaaatgtggtttgctagtggatattctagtttcttggttatttgcaattagacaccgtaatattttatcatttcttactattttagatagtcaaatgacacaaatgtcttggtaaagggctggcttgatgacaacgagtacgaggtggagcggtccctactccgggcaaagaggaggaaaatgagagaggaagcaacacgacatcgtcagagacgaaaagagtaaacaacggtgagagaaatgaggtgaagggcatttttgggccatttagcaaagtttttctctttgaaatggcaatgaatgacaaaataatatgcacagtgcccagtaggcggtagcaaacaaccaagaaattagtgtccacggtaaacccgcgttttaatagtgttctttagtacataccatattttttaatacatcatgtagtaatttttgccgtactaagtactccctccatttcataatgtaacatcaatataaatatgaaaaatgctagaataacttatattgtgaaacggaggaaatatctgttcgaaagctcgttttggcctctcttttttttttgccacacgtgaaatgagaaatgccattaccattaattaaggttctttttgtacagctttgtatccaagatttgatagcctgtgtgtgtttagttccctccaaactttcaacttttccgtcacatcaaatgtttggacacatgtatgaagtattaaatgtggacgaaaaaaaatcaatacaattggtttgtatgtaaattgcgagacgaaccttttgagcctaattacaccatgatttaacaatatggtgctacagtaaatatttactaatgacagattaattagacttaatagattcgtctcacagtttataagcggaatctgtaatttgtggtgttattagtctacgtttaatactttaaatgtgtatccgtatacgtcaaaattttttttttgccaaatcaactaaacacggccttagttctacaaatctatggctatagatctacaattacattgataacatttaaacaaattattttgtgcacatttcagataaaattttaaattttaatccactttaatcttggagccaggtattcttagttccacaaatctatagctctagatctacaatttcattgataacctttaaataaattattttgtgcacattttagatgaaattttaaattttaaaccactttgtacacatttcagatgaaaatttaagctttaatccactgtaatttgatgtataaactttaaatctcccgtaattctgagatctaaaactgtaccaaataaaacctaaacctaagtaacgagaaaattctgtgtatcctaaaagtttgcctgatccctttcatagcttaagttttactcatttccttttatacctccaaattttagtttgagtacttccctctttccattagttgatcgttaatattttattaagaaatccatttttaccctttggtattaaagaaacaaataaatttatttatggaatatagaagtctgtttaatgagacttctaataacaaatgtcttataaatttgttagtaaaataaatagtcaaacatgtgtaaaaaaaatcaatagtgtcatcaattaaaaattgaagagcttatgtagcggaaagatgcaatgcgcggtatcatcagaacctaacttatctttaacagacatgatttttatataacatccaaggcatcatgtgagataaataacattaaatctaagtatgaaagagtgatgtttgcattgaaaaagtagtgtctaatactagtttttttttcttaatgatatagagtttatggaaactatgtgtagtgtcttgggttgggactggccttatgccatcccaatgcagcattgcacccacaccaccccaaacggcagttatagacgcgaaacaccgtgatgttcaacagtcaccaccccggttagctactttgcttcacttacaaaaaggacacccattatggttctgggtatcgaagtctctgggcaaaatgtgagaacacctgtggactcagggaaccaaaggctcttggacaaaaagtgaggcgccttggacaaaacgtgtaggagaggaccagagcgccttgcccaccttgcgaacacccatgctgttcacctagcctctgtgcttgcagatgccttcaaggacgccagagcttccctgcatgtttcaagaactatgagagaagatgcgataatttacgatggttttgtccatcgatagatgcagcaggcagaacttttgttccattatttaaaaacgaactatgagaaaacaagttcgatagcttcataactcgtaattcctctagcacgggtgaatgcactatgccaataccttgatgagaaatgcaatgcacacctcctctttagtttacaatttacgttaggaaattcattggcgggaagattccatactcccttgtaactattgtgcctagtggacagtgctgatcaaagagcaagttttggtacagtaagatatggatggcatcaccgctaaagcaaaagtcctgacaaactcccaaaaacagaacggaatttaaataatattcataccccacaagttttcaaggcataagtttatgctaaacctaactacaacataggaaagaagccataggccctgttcttttcagctacttcaccgaactattgccatggatacttgctccacacctctaaagattcattttctacgaaaaaaaagaacttttttctaccgcaataccgcattgcttcgaccattagttccaaactagtttttgttaaagtttatttctcaaaatatttacaattaatccaataatgaagtagataatcaacagcattaatccaccaaataatctgtttcaaacaccaaataatctgtttcaaacagagccgtggtgtggccgaaatagacagaaaggataccgtaatgcatcctccatctcagagttccctggatccaacttcaatccatcgtaaagtgtttcgcaagcactctcgtagtcctgatgatacaatgccaagtaaataagcaaataataattttcagcacaaaaccaaaacatagataattgcatcatctattaaccttcagtagcatcagagcagcaccctgtcggtagtaggcctttggccagtcaggccgcaatttcctgcattcataagcatccaacaaagccttgcctccattacccatgtgatgccagcaaaggcttctatttgagaacaaggttgcatcatcagggtaaaggtccagtgcctacattgaataaggaaaagcatgagttagcagatttactgagaacataagaacagttaacgaatctgcaaacacctagaaacaagaaacttgcacattgccacactactatcacactagtatacagaaactggttgagcaaactagacaacaaaactagaaaatatgagagattcttgaaaataaaagtaaggtaatgtaacatttataatatatatatggaattttaaatcataccagttttggattaaaaaaaatcatgttcactagttcttagtccgtgaaaatatggggatttaaagctttctctagaagttcaatgtagtttctctatgtttcagtcacaactcacaagccaagcaactccacaaaagctctactgtagtttgtttcatggcataggagtgacagcaagagcactgagaaagtgagtctcctagaacaattgcgctactctcatcacgcacatattctctctttccgttatgataaacaggtatacctcaacagagcctatgtgaaaatagtataaaatatcaatggtttctacgcgaggaaatgcaccacataactgaatgaggaaataatatatctaggacattggcactctataggtatggtccaaagccccaagtttttggtaataccccttgtagcaacattgccaaatcattggtttggctgttccgggaacacaaaaaatagctcctatgtacattgagttagattttttttatttttttacccagcggcagtaaattttgtacactgagattttttttttctaaaagaatactttagattaacttgtttgcatgctgagaataagcaaagccaggtcataatctctgtacaatgtatgaaagtacaagttcaaaatagagttgaacaaaatgaggaaacttggtgttctgaagtaccttactgtagaatcctgttgcagaaagataatcctttttctcgaccgccttattccccaatgactttaactctgttgctttccttttactgacaggctcaccctaaaccatcaatatatcaacatataagtgctatgcaggaaaagtcataacaataagcaaccatctaaattcatgcattggaaattcaggaaaattggatttaattatgtaacatcttcagccatcatttacatgattccacatttccacatgcctatgtttcaatgagaaaatctcctaatttccatgcccagtcctgtaagaatgacaacttgctgcctaagttttcacttgtgatgataatcctacaggaactactggtatcggtataacacatcctacgcagacctcaccagccatactctgacacttgtaatgggaagaaagatgagccttcatcattaactaatgacacagtttcctcctacattttatctcctacacatctagagcacttcaagtcttcaacgcatcccttaacttctaatcttaagacagttctcaatcattggtaaccaactcttgtgcagaattgggaaaatgaaccgatgtggtactccttaatgatgtattcaaattaactaatgcaagcttatctttcagtcagaatgggttgttcccaaagtaattaacaagcacaacatgtagatatataaaaaaacgctatatggcacttgtttggagcagcaatggttaaccattaatgcaacatgatacttattcacacattcacatttcaagtgttaggaagataggatcattagatatgaaaattttttatacaattgttttaaattattttaacaaatttcagcccatatgccccctcctgtcaaagcaagtatcactgtagaatgtgtgcaatcaaaccatctttaaccaaacataccctctagaatattaaataaaagttttcactttccatggtctaaaatgaaaggtgttgagtacagttaattttcttatattacactagcagtctagcacaatcgataaaagatattattttgcaagacaaactcagtgacattgttctctagtgttccatttacatattttgagcatgtcaccgtcccaaactttcaaaacatttgaggacaaagggagtagaataaaaggacaaaaaacttgtcatcaaaattgcatcttgttaacttctcagtagatcatgcacagatgacttcatgcactgagaaagacggtaatcatgagctgattttctttatttttaaatcattgtaatatacaaaaaatcatgatgaagcttaacaaatatggagtatataagaaaatatttcttatttttgatggttctccatctctctgcctctcaaaatagaaattgtctctcatatgtttcctataccaagctggataatttgtgtcaaccaaaatgacaaagtcataactatacaacattcttgaaaataatagtttgcaagcatataaactatatataatatgcgaagaccattcccaaatatgtaccagcttaggcatttagagcattaatcatagtaatggagcaactgagaaactttgaataggaagaaaagaagtagcatgcagttattagccacaaacatatccgtaaccttgaaaaagtacagtgttaagttaccaacagaattctaatctatgttaaaaaaaactgcaatgattaaagtgcatccttgtagtgcgatgaggtaaatcttacattatcagaaatgttacggttggcaccagtctcttccattgagtaattgcactcatttgagccaccctttgcagcagttgagatgcagtctccactgacaacagcaccagcctatcatacaaaaataagtgttaccatctgtcccgaagatgacttggcaacatttcataatttttataagtttcataaacggattaacaactttatgtcactagctctgtgttgtgaactgactattgagctcctgttctttttatcctacatgtggcagtcaacttgatcataagttgggctttctaaaatttttataccataagtagatcacgggctacaaaaaaatgtgtagtcggtgtacttttaacaagccatatacagaagaaaaatgctgaacttactaaatggagtgtggagaaaatgtcaaaactcataacaaagcaaacagcccaaatatattgtaaggattgaaaaatcaaataaaggtacagtacctcaatcaggaggtttacacatttcaattcaccagcagttatagcagtagctagaggtgtcagatgaccatctaccatcttgttaaactggtgacagacattaggcatatgttcaaataatgatacttgagggaaagaagacaagcaataaacggaaagataaaacgtataggactgtaatgctgcatcaaacatgcagtgaaagtgaatagcttctattgcattacaaaaggaaataagctcattgcaacatacagttacagaatatattgagggtaggcattgttttgttcaaatcttaacaagtatattttattcaattcaaggtggaggttaaaaggagcaaaatatgattgcccaagtagtcaactatcatggcaaataagttgttaattgcccaagaacttactgatgacacaaaaatcagaacttctggaatctgaactcctgaagtgacaacacacgtacagaggtattctggaactccattagaaaactagtataatggcatttccatcctaacaacaaaatttttttcttatgcgctaaaaatgacagcacaaatctagatgtagcttgcttttgtggagaaaacgatcaggtgaatgaattatcaatatttgttacagagatatggtccattctattaatacatagagggactggcgagtctgtctgctttccttacctgacttaagaacacaattaaacaagcaaaacatagaaaattgaaaatctttcatagaacaactcttgacttggcaactcatgcatgatatcctccatcgtaatcttcatgcttggaacctatatactatacttctctcacacctatctgttgccaacaggcatgagttatgaaatgccaataccatgttgtagcaagacgatccaacaagactcaacagtgaaaggcagcacagcgtaggatgagtgagatggttatgtgaggatggtgcacagcaatccataagtatcaagtaacccaactacaatcaataaaatggaacatgcatgccaacaacatgccaacaaggagctgataaaacaagttggcgcagaaagcaaccaattgaacacatgtgttcacttgtccaaaggacaagttaaggcgcaaatggcatgctgtaaaacttacatctgcattgtggtccaataaaatcttcatagcaccatctttccctttactagcagcaacatgaagtggtgtgccacggtttgcgactgtgtccacacaagctccttttgcaagcaatagctgtactgttccacaatctcctgaaaacaaacaagaaaagccacttgttacaaagttttttttccctttttttttgggcggggggggggggggggggggggcgtggaaggctataacatctatttaacatattcccacactccacacaagttccaggtaagtagaaaatattccataagacgaagatctacagttggttggagaaattcgaaaacacaaaatactcaaggtgatgtgaaggcacacatttcaagggctattagcagggtttaccaaactgttttgggtggggttatcgccaccccatggtttggcggttatcgcgataaccgtgcggttgccgcaaggtataccgtggtttcaaaaattgagaaggttaccgcacatgataaccgtgataactgcccgataaccgcacggttttgtaaaccctggctattagaaagccataaaaatacagaaaggaagttagatagcaaatgcatgcttacagttcttatccatagggcaaacaatgaaatttgtgtccaaaagaacttttagaggatacatttaatacatactggcacgttttaggcagttccaatgataattacaacatgacttatcagatttgaataaaattcactatgttatgaactgaggtctgaggaaataaatgtgaacaaatgcaaacagatccctacgacaacaaacaacaacataatctactataagtatataaaaagacaagttttaaaagcaaaaccagcagatgaaaatcaaagaaaagtgtttatagaggggcacctaaatgagtggcgtaatgtagaggggtgcgcccatcatggctggctttgtttacgtcggcaccatgatcaagaagatacttgacagtgcttaaatgtttacaaagtgttgcaataatcagagcagttctacctgtcaagcacacagaaaagcttattgaagcaaagtaactctgtattacattaaaagaaacaatatcagtttttattttctttgaaatatatcgccataaaaagttataatggtaacaccattttctgagagcatggcatctaaaagttgctcctcaagataataaagtatgagaaaaataaaattttaggtatcataggaagtagaaatgtctgactgagtgcacgagataacattgggcagcctagttattatggaacatattgagtattataaccatgggaacataacagaatatggaaatgaacccattcattttgcaagttaggtgaaaattgatgcctattaaacattgcttcacagtgccatgcataatcttatcaaacacaagacaatttgagtacaacctaccatgaagttatcattgagacacattgatcaacaaaacaagctactcaacaagctagtgccccgcaccaatgtttttttagaaaaaaaaggcacattgtagattgtttaaaaatggtgtttttttttataacgctgaaaaggattaataagaacttaagagtacgtgcacgtgatcattcataacggtgcaaaaaggaggggttttgtatcgggcgagagaatgagagatggaccttcctggtcagcgtcatccacgtccagccgcagctcctcgacgaggtagcggcacacctccagcctccctttgccggcggcgaggtgcagcgcccccatcccgcccatcggcgcacctctcaccctggccgcctgcaccgcctccccgattcgacccctcccatcatccagcaacgtcgccatccctgcaacggctcggaatccccccaccccccaccaaaaaaaaaaaaatcagcacacccacccaagcacccaaaattgaaacgcccgccttcgcgaccgaaaccaaggaaggatgagcagaagccgcgttagtgaattacccctgacgatgtagaggtccccgttgtgagccgcgtcgaagagcaacttctccaccattccgtcggctgcacgggggagcgaggagcagatcgagttagtcgagttagtcgagtcacggggagaagtatagtgtgtcatcagttcactgttcactcgcttagctggaaattgctgcgggtactcgtatgctcagttgctcacgcatggatgatggatcggactcatcgatgggccgacctgtttgttttcgacgaatggattaattcgtactatgtttttcgaatttctaaacgacataatctttaaattaattgtcgttcttgtccaaagtcgatacatctttgaaaacccatatcatttaacaacatgtgtatcatgtattaggaaagtattttacacggtgaatctaaatatataaatcttacaacgtttaactatttgatatttttcccatcgtcacatcggtttttccgtccgtcgctcgcgatggccaccatgtaaggctttcggaagattttcgttcgtcgtcatccgcatccgactcctcctgcgcgcgtggaaggactccaccctctcctggaaggactcagaatctccccccaagaaaaattaagtggataccggaataaaaacaccaaatcaatcaaattcctaagcaattggggcttagacttaccgaatcggggtcctactcgttgtcttggcagcatcagatcatcagagcctgccgcgcatagcatcagtcccgtattagctcatctctacctcccggacggggctcgcccctggctttgttggctgcacaagagcgaggctcgccaccaccgtggcttctgctgcacagaggagaagaaccggcagggagcgccatgccggcctaagctcaccgcacgccataaccgccgccgctgccatcaccttggcgtcgccagcctcagcttgctagggcaccaggcttggacttaggcacaccgccgactagaactccactagaaccgtgcgacgacgagggagggacgcagcttggagtggcggtgacggcttgctgtcgcggaggaagcggcgagagggagagagatgaagggagacgagaagacgagataagtcggggtggggaatcggggatcaatctaacctcgaaccaagttagatttttcagtcccttcaccgacagttagagcaagtttaatagtatagccaactactagtttcaatttatctatagtcaatctaatagctcattcatataatagttacatactacactattaatacctggccccacctgtcatacacactgtgtcttggagttcgtgctacagctggctacaaatttatagcccgctgctcttctctctccttatttatcctcttaatatgggtcctgttatcagcgatattacaaaagcagaacaaacacgagggacaaccgcatgagtatccttcttttaaagtattaaatgcataatttaaaataaggtctaattcactcttacgccagggataaccgcatgagcatatttttttaagtattatacgcataatgagaaatttactataatagaaaccgagccaataaaaatatccattgcaacacatggaccttttgcttagtaaggaaaaagaaaagcttacccatccaaaagaaacccaaactaaaaggcttgggaataagttcacttaatgacccttaaaagtgatcgaaatctaatccatgaccccaaaccagaaaaccggatatcttgacccccaaacttttaataccggtgcaatttgactccctgggcggttttggaggacggtttcgctgacgtggcgcctacgtggcagtattgactcggtcttctttctacgtgacattgacgtggcgcttaggtggcattagaaataaaaaatatgcgtgggacccatctgtcattcacacacaaaataaaagtggggccactgacatgtgggccctacatgtcatcctctctctcactacccttcttcttcctcctttctccgttgcttctctctctccgttgacatgagccgccggcaggagggggctcgagtgccggtggtggtgggtgggtgccggagtgatggtggacggtgtaccttcggcgacgggcgcgggagcagctccttctaccgcaccgggcctcgggcgacggtgtacctccggcgacgggcgcgggagcagctccttctaccgcaccgggcctcgggcgacggtgggcggtggacggtggggagtacgggcggcgggagctaaagaggcggcggtggcggcggacctccggctagtgggcgacggtgggcggtagacggtggggagcacgggcggcgggagctaaagaggcggcggcggcggcggacctcgggcgagtgggcgacggtgggcggtggacggtggggagcacgggcggcgggagctaaagaggcggcggcggtggcggacctccggcgagtgggcgacggtgggcggtggacggtggggagcacgggcggcgggagctaaagaggcggcggcggcgggcgacggtgggcggtggacggtggggagcacgggcggcgggctggaccgttcggctgctgctcgccccctctatctcatcctcctcgtagtcgtcggcgtcgacctccccgaccatgccgagtaccagatcgagaccagtcgtccgccgcccctcgtacgcccgccgcggtcgccgctctcgtctccgacctcgtcggctgcggccataaccaccacccacgggacgcgtcgccgccgctcctggtcagcacgcggcagcgctgtcgcgagcacaagtgcgggaggaggcaccggcggcggcggtggcggcgacaacacgagctcggcggctctgcctctcccctctcccttccggcccttacacactgccgccgcctctcatgtcacccatcacatccgtttcctccctcacctgctctcctctcctctcctctctccacttggcgaggccgccgccaccgcttcagcttccgccgccgccgccgctctggcccccgcccgccgccgctccagctccagcctcccatgctccccgcggccggccgaaggggagaggagaaagagaaagaaagagagaagggaggaagaagaaagggagagagaggtgacatgtggggcccacatgtcagtgggcctcacaattttttattttgtgtgtgaatgacagatgggtcccacgcatatttttatttctaatgccacctaagcgccatgtcaatgccacgtggaaagaagaccgagtcaatactgccacgtaggcgccacgtcagcgaaaccgccctccaaaaccgcccagggagtcaaattgcactggttttaagagtttgggggtcgagatgtccggttttgtggtttagggtcatggattagatttcgatcacttttgagggtcatgaagtgaacttattccaaagggcttgctatccctcccacaatcttcctccttttcaggcccattggcccaataaaaaaaaagcgcccaaacactatctcctcacctcccattcccgatccagccgccccccgtcgccgatcgccctgccccgccgcccgcccgtctcccccgcccgtcgcccccgccccgtcgcggcgtcgcggtctcgcgtcgtgtcgctgccgcagcccgccgtcccaggtccccggtcaggccctccacgctcgcgccgccccggctgccgccagcggccagccgaccacgccacggcgccagcaggcagcagcactgcagcagtaggcaggctaccaggcttccaccggccacgcgccagccgccagcaacgccgcccggtcgttcgagtccgacgaaggtaactgccctgcgcccctgctgcccgtagcccgtagatgtcatgtctagatggttaagaagtaggaacattttggattaggaatataggatattaggatttagttcatagttaaatccatcaatccaggatggttcatttgatttaggatttactccctccgtttcaggttatatgaaacggaggaagtaggatttagtttatttcaatccaggaatggttcatggttgaatatagtataatgttgttttgtacgtttgaaaaatgaagaaaaaaaaaagctcccctcggttaatttaaaggccttttttaagataaagctgccacaaagaagagaactcaagaattttttttatctcttctaattttgaatacccaagttgaaaatcctaggcccacccctgggtccgccccctgttgttgatgacgcaaattgtttcttggattggagcaggtggttggtgaagagggaggcgaggccgtgtgcccctgccgctcgccggggatggataagctggtgcagttcgggaggaaggcgtggttcgtggtgcgggtgctgtccggctacgaggagaggaggatccgtgctcacaggctgcagatgcagcagcagatcgcgagggtaaggctggtgttttttgtttctttaaccatgacacggccattttcttggatggcatatctattcttccatgaattgtgtcatgtgaaagctgaagaaagcatttttacttttgcaagtctctaatactatggtaaagcgtgagactgaatcttctagttgtcatctttgggatgacctgcttgaaatgggatagggttgcccgctaaggatgtagttatcttgttttcagtagagttttgttaaattgaagctggaatcttctcctttagctgattggcaatttggcatggcacggataagagattattgttatggtaaattggtcttgtgtctaattgacaaatatgctctttttgtgtgcctcacaatgcatatccgttgctggtttcattgattgtggaaatatcagctatgtcctgcaagtggtactagttaccatctgctttttattcagacaaaccatcccacttattgtagtcttatccaatttctactgccacaaccacaagtaactgttttttatatttgtattgggaatgattatttacttccatatcttttatacatggtaactgtgcttatttggcagggttactgatgccgacagttatgcagaataccacgtattgtacctattttacatactcaattactttgaataattgctctctttgaatagggatttcgtaatgcaataatccaatccaaggagatagccaatagataaaattagcaaatatgctaactgatggctgttcagtcggtgtggttgttgtgttagcttcttatatgcacgtccctgctggcccatgatgcactgccttgaagttcttctgccccaaaataacttcatttctagcaagtggtattcaaattagtctattattaataggaaagtagtattgttgggtgggtaggaaagaggatatggaaggggataaaactcagaccgggggtatgcaaagggtataaatgaacttattttgggataaattttagaggctagaaatgaagttgtttttggtacggagggagtacaagacaatgtgggtccttgtgggatatgtaaataaatgggaaccgatgaatttgtttttaaaagaaacaaaagattacacttttctgattttttatagttttggtgttggtaagggttacgatcacttatcctaattccagtatagaaattattaagttttcagtactcagctcatcaaatgtctgtaaatgttgcaaaaacaatgctttcaaggtagcatggttggttatccatggtgataacatcaatcatcgttgtgtatgcattcattagttgcaatgagcatgctgtgttcatttacatgaatacttaaaatattaggaactttttccaggcccaagctaagaaggaagagcttcggaagcagccagaacaaattattctatcagaggttcgtcaaatggtgcagcagatgcaagccctcaatcagcagcttgaagaaactgtaagacatcctgccacaaataaaattacccagtcgatgtctgaatgcctgcataaggaatgtgtactgtggttttgagaaagtgttacatgttagtttatgaaccatctcacaacttgaatcatgaataatgctttaagttacccatgtatacctgactgtaagaggtggattggccatcatgctgttggattttgaaggacaccatatcttctatggtttaatcgattgtttgctttacttgtttgccatgattttatacgatggaaatttaggtgtaacagaatggcacatgttatgtagtagtaacttctagagatgctactctctctctctctctctctctctctctttttgtggatctataacgtgctaacttgttctccatcctattttgcaggaaaccgccatagatgagtatttcaaaccaatcgataagaatgctaagatcataacggacatgcaaccggagaaagaagagaagcaaataaaggagatgacgaaagtaatgcaagatcaaatagcaatgcaaagagaaattgcaagtaagagagctcaggccactgccatagagtctaaagacacccaaacgagtgacaagattgctgaaggccctccgaaagaagaaaccatgaaataagtacggttcattgttagtctatttattgtaaacaagtattatgtgcaaatggattctttacataggctttggtgggctaggcaataagtatggatgcatgggaggacagttgccattttttgtcactaacaggaggctatccttttctctggcagagctctaactagtaactagtgtgctttactattcaagattgtgaaatcatggaacatttgttcaatgtgattctgcctttcaaattaaaaaaaaatgcagtgtgaatatccagtctaaggtttggtagaacgtgccataacaatactccagagttactgtttgtatattcttcgcgggtgctgtattagcttatttttggatttataggggatttatgtgaaaaacatgaatttgacgcatatgagatttgacctggaatctcggatatatcagttatggtatttgtgtagtctatatgttgctacattgacgtaatcttgtgttttgttatggaacaagaagagacatcttaggaaaaaaaatgtgatgaaaaacaaaatccgacctgggttccaatattgggctcctggcggaaccttttgtgtcttaccacttatcatcagagcgatcttctgttccttgctaatgattttaatcttgtccgtctgttcattaacaataattttaatcttatccttctgggagcttctgtatgtttgaacaaacatgtcatgtaattgtgaaaaggtaaggggttgcactttagtgcagaagcagaatgctttcatttgcttaatgaaacctcaactgtcaagaaaaaaatgagaaggttaacacaaggagtaagagatggttaactcttttccctgggaaacataaaagaaatttgatcaaacaaatatagcttcagttaattacaataccacacatacaagcattagagcaaggtggatgcatgcatgaaagcacacataaccagctgctctcctctgttcagaatcttcagaattcttgtgataatacaagtgctataaacattggtaaaaatcctgtacaacactcacgcacctagcacattgatattcgctatcactttttgagagatcatgtcgagaagggagatgtggaattgaattttcacgaaactgttgaattcttctcgatttgtttttctttgaggtgagttgggaattgttcatccttttggcattaattgagggggagtttggctctttgttgtattcatattttcttttcttcttttgattcttctttttgcatgaatgtttaaatttatgcatggtgtgatataaaatgaaaaaaataagaaaaggaaaaaaaggagaagagctttgtatattcttgtgcattctagtaatacttgttagataatatgattactagactagctgtgtgcattttagtttttatatgagcttttgatattgtttttgagtgatatgacacatgacacataattcctttatttgaattaaggaaatatttgaagttagtatttagtttgaatgattaatgcttgtaaacactacctgtactaccattaatttggttcggctgttgctgtgaaacagaaggaactggagtcttgggctctatccatgatgtcagccatcaagttagctttcaattcacacatcgaaaataggtttgccgacccattgagtatggcggtttgggagtgcttaatctggagtacatgagttggtcgctccgaatacgttggctctgtaacgttacagaagactgatagtgctcgagcgtggcacagtctaccagtccaggtgcctcatgtttctcgtgagttatttagcatggcggtaaagacttgcataggagatggacaatccaccttgttttggacagatagatggctggaagggaaaactgttagtgagatatctcctaatctgactaagttgatgccaaaaagactgtcaggcggtgtacggtggtgcaagtcttggacaacaaaaaatgggtaacagatattaacagaccattgacggttcaggttcttgtggagtttctttagatttgggacttggtcgaaggggtggccttacaagttggagttccagatcagcatgtttggaagctctcaaactcagaaatttatacttctaaatctgcatatgaggccatctttgttgggacggtaaggtttgcatcttggagaagaatttggaagagttggacgcctttgaaatgcaaattatttatatggttggcaattaataatcgttgttggacaacagatcggttggacaagcgaggacttcaacacccgcctacatgtccattatgtgatcaagctcaggaaaccattaatcacatcctaatcacttgtgtgttttcttgacaagtatggtgtttttggtcttacaacggcttggctactctagctttccaacctagattactgctaggtttgtcaattggtggtcaagaacggtaaggggtttacctacttatgagaagaaagtgttaaactctttaatcatcttggttgcttgggaaatttggaagcacacgaacaattgtgtgtttaatggcgctaccccatgcttggccgatgtcctccgagccatcgctaatgagggcgctctttggtgcctagcaggagttgctagggtccgtgatctctttactagaactgtgctgctaatgcactagtttgtgtttttttttctttgggtgtgtggtattatgttgtatctttggtgggtgggtgtcgaagtctttttctaacaccgtacacattttcttctctatcttaataaaatgatatgcagatctcctgcatgttctaaaaaaagatacgaatgtgagagctacacaaatgttttagggtgaatctatctaggttggtgttggtatttcttataccctcataaatttgtttctttaaacgtcgtgggattgttggaaggttagaggcgccacgtcatctgtttgttcagataattaaagatatgcattaatcagcgatagggcagcttaggttttaattggtgtagcgacgaggggtagatgcgtttgtgctcctgtatcgttcctattgggccctggttgctgtgccggcccttccttgcatatgggcttctcgcttcctcattacttggcccacgttttatatgttccataagcgcacaatattattgatgcagtactttcacttcatagtattctagagtagagtatcgtatttatattttcctaaaggacacactgatggcataaaatgtttccttttttctaccttgctttgtctaaggaaattatactaaccaatcggggataaaatccaataaaagatatgatagattaagcctaccaataaaacacacatagtctaacctatctagttgtcagagtttcagagaagactatgggtaaccacaaattagactcgagttattcttggcgcaacttgtattaatggggtaagagttttactttaggcaccaaagcaccggttcccgctatggaagaactggtctccctggtcttgtaatggcagtgtactagagctaacacggatgacttcaaaggatgcttgaagctatcaccatccgactgactatgtcctttgatgtttctctagctttcctttcctagaactatacgaccaaggcaccacacctttgtcgtacaataaaatacttcccttgatacctccagaattagctaggtgaactaagcccaggcaagaaacatataagactacacagcagattcctagtctaatgcacacacgatcgaccaatcattcgagcggataaatattctgcaaataaagtaaagactttaaagtaaatgctcagaaatgtaaagcaaataatgtaaatgcttgtaagtaaatattctgcaggggaggccatccgggccagccttggcctcctatctgaaagggaagaggagtcggccgggcaccctagctaggctggccggctaggtcttgcccaaccagtcaggtcatcaagcctaattggtcccttttcttccttcttccgtgcatctcttcattatttgagtggtacctgcaaaatagctaagatgcgacaaaactagtggaaatagaatagtctaaaccaaattgatgcattgaacatagttttaccctttttattgtcaaaggttggtggtcaaaatgagtttaattgaccaccatcagctatctaaaaccgaatctgaaatgaatcaaagccttcttcatttcaaactcatttggaaagactttaatctgtgggacatttacgtagatggacctattccccgttcaatgctagacttggaaaaatagggatctagtaaacaagtcgcttaagacccacattcttcttccttgttgtttcttgtgtgtaactcagtttgcctatgaatcaaatgtcgtttgatttattggaaagtagatttgataaaatttattggaaagtagacttggtaagcttgcaactatgtaaaccatgtatgctagaaacctctgagttggtgtaaaaatcattatgaacttcatgaacataagtgcaccggatcttttgcttgtgtgcccctacctcctgcttagccccacaagtgtgtttgtgtgcatgtcaggacaaagtttactgtgtaattggaacgactgtattgagccttagatggccagtatatataagagtatacaacttagatctcaagtaatccctgagaggctgagatatagatggaaacaaatcctatctgccataacaaccagatgctctctagagtcctaagtcctaaccatatatactctaaaaaaattatggagtgacaaatataggatcacattctcatgtattctctatattgttttaagagaaacaagtttatgtcttgagaaccacgtataaaggtgaatatccagtatctaggtatatccacatcatgcattctttgttaggcacttaggtggtgtttgggaagagggactaaactttagtccttctcacaaaaattttagttcctatgggagggatttatatatgcttttgtgagagggacctccttcccaaacaccaccttaggcctcattgagaagcagagaggtggcaggaacagaggtgatttcgttcatatgggataaaattgttttttcagcaattcacctatgcaaattgataaaaaaaggaaaataatagctcaagttgatgaacatgctaaaaaatacagtgagaacattgctagtagaataaagcaataatttgattatggaaatataattgtgatttttggattgtaataaaccagctttttcatgaggagaatcacaataaaatagattgtagatatttggcaaatattctcttgtaagtaactaattttaaaaatacctggtgatggtacttcaaagctaatatatcaaagccaggacaaaatgggcatggttttattcatatccattgtccaacacaaaaatggacaaggaaataatcaagtaccttggtttcaatatttgtcactagaaactgtttatatttaaactttaatcgatctggttttagtaaaaaaataaatattgaaaattatattaaagtatgttgcatgctaaatataaccgtacaaccatcagtctaaacaaccttaacttatgactctatagttattgatagtcaatgtaaaaatagtatagagaaatggtgatgattatttggaagtggatagaatatccggtttaagatattttaaccgttaaccatcaagctatgataggcaccgaaacaaaggtgggagtactatcggttcaatcgaaaagacatgcatggaaagcttttatatcggttaactgtcacttcgatccagggcagtgaggccccaccgccctcctcctccccctctattgacagttactagaaggcaggagatttgtagcaatcaagcccctcattagcacatgctatcgtaaatattcaccctccactgtgcaccgtatgatccccaaggggggctgccttcttgtcatcacccgatcgctgcccaacgacccaagatggcaggcacttatggtccttaccatgctgccagttttctctcgcccccatgtccacgcaacatggtgtgcatattcagaaagccttcatggagccgagccacgctgcgccgcacagcccccaccgccccgagtcgagccaaaattcgggtgacacgtctcatgcgtgcggcagcgggtgttcgaaggagccgaaccggcgccactcggctaaggccacaactcagcttggggcccggggtagcgaggatcatgtgacaaatggcactgcagtaaataggggctcccgtacacagcaggttgggatgggggcctataaaaggtggccccaccgagcacacacatagacacactacattgctcgctcctactactgttcacgtctctctcgctctctcgcttcggctgccttccttttttttcttctctctcccttccctttcttcctctggcgagaggaggtggaaggaggaagagtggaggcgaggggtctagctgaccggggaagaggcttttccttgcaaggcggggtgacctcttcgtcggttcctccgaagatctgcccgtgctgggaaagcgtgcgtgtgggacccctgcccgagtggttgctacggttgcaccccgatctgctccaccggtgaggtaatcctcctctggccgcttggttggttttctcctgttttcctttcctaataacgctgaaatgtgggtcgtctcgcatgtagccgcatgggtggttctttcttccctttgttcatgcggaggcaaaggaaggggggaccatgttcgtgttccaccttttcttttctattttttgggtgagttttggtgcgtagaggaggggttttaggtgggggagtcggggttcagttttgtggtttgcacttggattgcaagaattggttttgtttggttcagaggcattcaaataggagatctggggatggacaacgacttagcacagatttctgattgaatgcatgtgtgttgtgttcttttgttggattgattcttatggaatagcatatcaattgtgcaggaaattattagaatgtttatgccatttctgctagagtatcatgctcccaggatagactcggaaataaaatctgccaccctagataacatcatgcctagctagtagatagaattgtctattgtcgtgaaatgagatgtttattgtgcaagatactatttggtggttttccatatcagtgaaattgcaatatttaagatctgtgagaactatttccacctaatgaaaaaaatataataaaatatggtagtgggaaaatctttgtttggaagcaaagtcttccgctcacatgtctagtgctgttgggtagcaagtgggaccatggcatgctttggattgtgtcgtttgtttatggaaaagcttaatttcaggaaaaacaatttacacgagtatcatgtgttgttaaaggatgaatagaatcatgatatggtgctgcctgctgtcaactgtttccgtaaaatcctaattttcagttaaaggtatcaattaggatggggcgagatgagttgtaaggcacgaagggaaaaccttcttttgaagcatagttctctggtcccacatttagtgttgtcgaacaggaaacggaccatggcatgtagggggtgccatagattgatcggtgttcccttaaaatcttcatttaaaagaaaattgatcggtgttcccttaaaatcttcatttaaaagaaaaataacctccatgtaggtgttgcggtgccaagggataagtataatcggcgcatttgggtggcaccgcgtttgccaactgctagcacaaaagcattttgaggtaatgccatctgcacggtatgaggtgtgagacgtggtaggacaagttgtaagctgtgacggcaacagcagctttgttttcaagcaaagtcctctatgcacgcacatagctctattgagtgacaagtgaacggtggcatgtatgtgagcatgaactgtcaatttgtgtccttataacttaattgcaaagagaaaatcactacacaagtgtcatgcattgctgaggaatgtgtaggaccacgacatcaaggtggtgccgcatactaccagttgttgcataaaagcttaatttaatgcaccctacacgaatgtgtaggaccacgacatcgaggtggtgccagatactaccagttgttgcataaaagcttcatttaatgcggtatgacgtgtagggtgcattagggcgagtcgtaggctaggccaggcgggcacatggtgacctgggtgatcacctcctttaggttggtcagcttctctaacaactgagattattcctagaagtcggttttgctccttgcattctattgtgatgttagttgaaaggaggtggtgagttgggcttggccaaatggcatgcgaaatggggtcgaccgacctacttgtagatttgtttgtccacctttaggtcgataggagttgagcatgtcagcccgggctgttggacgaggctggccgacatcttggtggtagaccaaaccaaattagtggtccggccgaccaccccaagactttcgaaggcaacctagggttacattacttcaggccggttggtcccaatgttttggtcagctagtcaatgtacaactttgagctaccttggaatgggaaaggaaatgaacatataatttagacatgttcgggctactagggggcgtaataccctactcctgtgtgtgttatgtgctattctttgcatagattcaagctagaattcccccaaccccttctcatggtcttggtcctccacttatgtactccaggtggtaccaaaatgattgtaccgaagagatgggctaaaggtacatttcataggctacatctacttatctggtagacatcctcctttgggtttcatgtgcctccaacttgcctgtaattattgttgtggtagtccttcctcgagtggagctggagaggaggggtgagtgcatgccacgtgtcccccatgatgcctgctagtgttagataagcttaatgggtgggggcgtgttgatgcgaaaaacacacattggcctggaagatttgcttaactcctgagcaggtccaaaatcttgcttttaggttcgtgagcgtgccagttgatttgatcctgcaatcaacaagaataaaagacaagaaaaccgagataaaatccataaatgatagccgatgatatatcgtcaatcgttgagccgatgttattagcattagatcggcaatgaagaataaagcaatataaaactaaatctactcgatcggctgtagatatcaacgatatataatcattctctcgatgtatacttaaactaagtgattgggatagatggaacatcatgtcgagacggtataaatcacttaagtctaaagataaattaagatcatgattatatgaacgtttatagcatagccgatcagatagatctagcatgtatcggctaatactccgataccactctatactaagatatcaaaacatacatgatatattaaactgaaagcctaatatactttaaagcaataaaatcttaatataaagggcagatctagcataacagtcaagcatataagacaaaaatagctaaatcaggtgagatcggctgaaactccaatactatctctattagcaatcataaaacaagctagatatcacaattaatagatcgaactcaactgatgcagcattaagcgtaaagataactgtaagatctaaacaagatgatgaaaacctctaagagatggtagatatgttatataatctagattaatgacaaaatctaactctatcgactactctctagcagtaaaaaccagccgattgcaggttagatgatgcaactaataaagattatgaagaatatatgataactcgacgaattacataaacaagattagagtgccataaagatggaagcactaatcccgagaacacaagccggcatgacaagtttacctctagttgaagatcgaaaccgatgtagctcaacccaaaagcaagaactcgtcgaaataaacgaaagtaaaagggtggcgatgcgccgaaagtgttattgaactgttgttgttgttgttgttgtttacatgggttcgggtcatatttatacccgggatacatgatatgtccttgctggacacgactcttatctctaacaaactctacgatacacataagtctttacggcagactcttgcccaaacatatttctaaggaaactatttaaaatatcctaattaatagatacaatcatctatctaagagcttatctccatcgtggcaatccttgcgtagcacgtcgattgattctagatatagttttataaccacctcaatgaaatcggctgtatcggctgtcttctgtccgatccatctcagccgatacagacttcagccgatgcctccgcaaccgatgcaaactctgttattcgaacacaatcctttgccaaatccactttgattccaatgccaaacctggttcatatcttaccaaatttggtcattagcagggcgtcatccacattcggtgccccaacaacccacttatcagcgtcttggtggagtgggtgaaaagtagtggggccggatgggcctgacggagtcaacttcaccgcctgatagcccacactggtcctcgttggaaaggcagtaagggtagtcttgtcccccactacccccacattgcatgcctaggcaggcagatatctgtcaagttttcctgaatgggggcaacatgaaattgactaggtgggatggcatgcctcactttagcgcattaaatgctttagtagcggttcgtcccccaaacactcttgaggcatcaggtgggcaaccatgctcgggacatactgatactgtccccctccccccgagcttgggaatggatgatgtggcacctaaatgccctgtgcccgtggtgtggggaaccctagttcccatatcactaatagttagtgattgaattggtatctagcgaaagttgtatttgaaacaaagtcccctacacatgaatctagtgttcttgagcgacaagtgggaccatggcatgtaggtggtgatattaaaatgctatttgtttattagaaaagactaactgcaacaaaaatgtcttctacacaaatagtgtgttgttttttttttgaccaggcaaacagtgtgttgttgaggtagatactagggaagtagttaatgccaactttcgaaggactacaaactattggcataaaagcttagttctgaaaagaagctttgtacatatgactatgatctacctatgcttcaagaaggcactaggcgctagtcgggtggctacctggcacctagacgaccaactagtcaaatccaagaaaatagcaagaatattacataaaaactaggcaataaaagaccaactagcaacacaagaacacttaagatagcttagccgcctaatacactatgtgcctatcacctaatagccgtctagtgcctaatcacgacggctactatgtgcctatcgcctaatagccgtctagtgccgagttttagaacactagctaggtcttgctaagggatgaataggaccatgccatgtaattaataccacatattatgggatatttcctcaaaactctagctttgaagagaaggcttttgctctacatagcattattgaccaatgagtaggaccatactacatgttaaccactaatttgttccttaaaagcttaattttgaagaaaatgccttttgcccatgtttttggaagtattgaggggctagcacatatgtaaaaggttgcgtacctccaattgttttctcttaagcttaatttcaaagtgaacttctcacatatatatagtgttgttcagtgattaattagaatcaggggtatgtagctggtgatgcaatttgacaattttttactctaaaagtatagtttaaagcatacacatctacacacttgcctatctttgctgattgtcaatatagattaagtccacttaaagtgtcaagtccacttagttttaaagaaatgtctacacacttgcctatctttgctgactgtcaatatagattaagtccacttaaaagtgtcaagtccacttagttttaaggaaatgtctacacacttttaaactagtgttgtggtttgcaagggatattccttaaattatggaatttattattgtggtttgcaagggaatctaatttaaactaaactccactttacactttaaagtctacaatctacacacttaaagtagatattccttaaaactagggaatctattgttgtggtttgcaagggaatttagtttaaagtgtcaagtgcactttttattgtgagggaatctacatttccttttaagtgttgtggttcatttgttgcttccttagaatcctcacttagagagaagattgaactatataagttgaaacaaatttcgctcagactggggtttatttgtagaggtgggattttgttggagggattggggtttagttctagagtagttgcttgattataccctatttttcttgctttaatattttgagaaacacaatcagaagtgtagttgcatgcaaccaatttactatgccattttcattatattgtgattagtattgatcttttgaatagtatatgaccatctaaattgcgtccttatgatattgtcataggtgaaaacgacgggaagctaactagaaccgtgcttcatctagacttgcacctctacagaaggaaatatggaaggtcaatggttgcatgagcctcacggcatcaacctatgcttctcaacttcttctacgttgcctcggatgaacccttccattgagacgggaactagaaatgtcacacatgtgccatctaaaaatgtatctactagtagttcacaagccagaaaaacaacagttcaaaaacctaagaggaaaaggcacaggccaaaggtcatcaaagaaggaaaagcaacccaggcacacaaatctacaactagtgagcctcccaaggaaaaggacaaaccagctggtaagaggaagtatgttaggaggaaggaacaaaatactacaccaacagagcatcaccctccatctaaagacgccgttgcacacactattgttgtaccaactctagccaaaagatgtttcaactttgatgggagagatcatcatgaagaaaatgtggatctgttatcgcaaactcgggtggaggagacacctacttgttatggggatgctcagctgttaacatctgccgtcgatggaagcaatatccaactagttcaaccttggtgtggcatcggcagcccaatttttgcttcagttgatccaatggccaatatgcggcaaatatgggcagagagtagtagagcaaacagggtaacttttgaccttaacaattctgcagtgaatcatattccaagaaggttttctaatcctacaaacagctatggccagaatttccaatttggttcaagagagcaaataaaccagtaccaacatttctacgacgacgacattccagatgaaagtgtctctcatctcaacagttcctcatgacaactgcaaaactcctcaattgatcttgatcattacttatgtgtgcctcaatcatccacacaaaaatcacctacaccagaccatatgcttcgtggttatatagttccagaaaatctagtcgtgcctgcttggcatactggaagaacctggatggtaggaaatttcaaccatgaagcttctacaagagtagtcaatccaatgccccaaggatacagagtcccacaaagtccaagtgaacctcccacatgcagtgaaaggaacacaacgaacataaatttgagtgagtttcctgcaaaaaatgatcagtcaaagtttgctaccaatcctaatgaccagattggagcttcttttggcctttgtgattctcacttctcagatgttcatgcaataggtaaaaagagaggatatgacactatcaccgatcatcaggtttcttttgatgcataccttgaacaatcgaatagcagaaggcagttctatagtgaccccctctccaccagctcggaaacgtatcttctaaccgaaacatgcaagaggatgagatcagagaatcatagcagttggttggatggattcattggaaatgtttcatccacatcggcaaatctgtctggtaattggaatacaaataatgttttggcaataaaccatggagtgtgtacaaccttggctgatgtacaaaggtcgatggcccttgaggaatcaagatcttcccggcaatacactgaccctactctgccctgcactagcaacacacattttatcggttcatgtgcacaacacacaaactcgcctgacagtgccatgaactcactgggagaaaatattgggcacaggaatggagaccatcaacttgagtctttagaaatcaggcctactcagcattacaccagtgagtgtcttggtttacccaatgagtggtctggacatttatcagctgggcacacacatttgcccaatgaaacaatgatcccatccataaataagaattggagctgttcggtggcttgggctgcatctgcagcacagccaacagcgacagtgtcgcaagtagcaagtgctgcagcagccacatccacagcccagccatctgaacaacgcgattatatcccaagcagtggtgttcatcaacctcagcctttggagaaccagatggttaaggggcaagatttgtgtcaaacacataaaacttccacaaaatatgtcgctgatggaaatccctccattaatactcctgtggagcatatccaaagaacacctattgaagttatgtccagttttcaatcagtgaaccgaccggcaacaactaagaactgccatctagaggcttctagagaaaccacatcagctaaccccaccgagaagccaaaagtttggagccggccaaggaaagaagtagaacccgttgggaagccaaaagctaggggccatccaaagaaacaagcagaacccgatgagaagccaaaagctaggggtcgtgtaaggaaaacaactgaagctaatgggaaggcagaagatagagatcctacaatgaaagaaaatgatggttgtgaaattataccatcatcacttggattatttagaagccataattgagaagttgaagctcttaagcatcaacatgacatcaaacaataccgtggaagagacaccaaaagatcttggtgcattggttcccttagagggaaaggtaaagaaaagaggttctcgggccgaagtgaaaattgatccagtcaccaatttgatgtggaacttattaatggcgctagataagtgtgaaggtgttgaaggaattgatgaagataaggagaggcttcttgaagaagaaagaagaatgttccgaggacggattgattcatttattgctcacatgcatctggttcaaggtatactatgtttgtaacattgtgcttttctctattttctactcccacatttaatatttggcctatgttatttttagattagctgcaagaaaaataatatcatcaggtttttcatgataagtggtatcatctaagttatacatttttttaatgcctttggaatgttgtagagacattttgaaaaatgtcttataagtgtattttagtgaattgtctctagaaatgtagttggcattttataaatgtctctgtggcatgcagcatttttgtagagacattttttttaattatgtctataagaaagtaggggcactttccaaaggcatccaattgtgcgataaacataggaaaccattgtgcttgtggcacttttgtagagacatttttatgtctataaaaagtagaggcatcaggacactttctaaaggcattcaattgtgcgataaacataggaaaccattgtgtctgttgcatttttgtagagatattttgtatctataaaaattagaggtattcaattgagcaacaatcataggaaaccactgtgcctgatgcatttttgtagcgacattttttatgtccataaaaagtagaggcattcaattgtgcaacaaaacataggaaactattgtgaaaaatgagagaaatatatgatcttgctagtgtcaatcctcgaactcaacacctctttagaaaatcattcttatcttcaatgcactaaccatcttaacctcatgtgactacttgtttgatatgaaccttatgttgctgatatcttgttgtttagtacatattaacctcctaaaaaaatacgtctacaaaggttagaatgccaaaagaagtacctttacatatgcggcaaatttttaagtgcctgtacaattcctctacaagataaatctagcaaaatgtgctaaaagtgtccctagcataaaagtattttagccaatttttaaagtgtctctacactatcgatctccaattttcaatgtttgtgtgtcaatcagactacagcgaatcaatcttctgtactaattgcatgtgggtggtgtttttggcttgtacaacaatacatttagtttttcagaagatattctaattttcattctaggcgacaggcgtttttcaccatggaaagggtcaattgtggactcggttgtggacgtctttcttactcagaatgtttcagaccatctttctaggtgaaatgagaacttctatcctatttggaataaggctaattttatgcaattttgcatgttcgtgtttcaattatattttcttttgttctttgaaaaatttcagttctgctttcatggcgcttgccgcgaggttccctgtcaagtcagaaggccctgagaagcctgcagcagtggagaagtctactcctacacctcctaaacagaaagatagttgttctggagtgttgggtgaatctgccaagttgcaaggtaatttctttgttgaagagataggtgacttgggatcattcaatactgtggatgatgggtctcttgagggtgttctttcctcgcaaaattccgtggtttcacctcggaatttctctaaatatcttctaaacggaacatatacaatgggttcttctagctcattggtgaaattcacacaagaggttggatcatcaggatgtcatcaagtcagtgttcttccaacctcagatctgaacaaggccgcaccgtttgatctagacacgacatatcagatctgtacaggacttgatcatggagtgaatatctcagatgtcgcgcaatccgaagttagtctctatcagcagcatccaattgatgcttctatcaacaaaaacaaagccaaagtgacagattattcatcgggcagcttcttatatgataatagagatgggtcattgagtcagcacatgtattcttctttcccctttcagccttcacaggaagctgaatgctcagcaacagttaaacaaagcttcttccagcaatttattagttcagaggaagtgcccatttctaccggtcactctttttatgacaatagttttactagtaacagaactgaagatccatatgtagaacagcaggattgtttcaataatttgcaagaagcatacactacaagaacaatccagatcaatagtgaaagatctcaaccagaatgcagccagcagcaggacaacgatatcagagttcaagcaaaaacatgtgaaaagcattcctcttcaaacttgtgtggaaacatgaactctcattcagatgttcccctaggaattgcttcaggctcaattggaaaatccaaacatactgaaaagagaccaaaagctaggaatgtgcggggtcggactaaaatgaaacattatgactgggataatttacgaaaagaagtgctgcacaatcatgggaacagacaaagaagtgacaaagcgaaggacacaatcgattgggaggcagtatgccaagcaaatgtgaatgaaatatcttttgttatcaaagagtgaggaatgaataacatgctagccgaacggataaaagtaagtattgtatagggaagcttttaaaaaaacaactccatccgtcctaaaatataacaatttttagttatgagaagtatagtcttatctgaagtcaaaacatgtcccttttcacatttcaacttgcaccattgtaatttgtttgtcatttctgcacaggactttctaaaccggctggtgagagaccatggaagcattgatcttgaatggctaagagatattgaacccgacaaagcaaagtaagtctaatgaatacactggcaaatactcaaagtatcaagctaaagtaagtctaatgaatacactggcaaatactcaaagtatcaagctattaattttcatgcacccatatttcctttctcaaacaagcctgaagagcttaataagtagtatcttgatcacagctacaagaattttttttatcttttatttaaattttctaattgttgccactcttggaatctaaaatttgccatgtcattgatgatacagtatgatctaggaggtgaaaattgaaaaagttcttcctcgtcggcttttatgcttaaaagaaccaatacattccagagcctttttttgacctttctagaaccttttctgactcttttaggggcttccttctgagcattagagggcttggactaaaaagcacggagtgtgttcgtcttttgacactacaccaaatggcttttccagtaaattttcattgttccttactctcatagttaaaatttcaaatgtatttcgattgaatctttgtgtgctaatttcctaggtggacacaaatgttgcacggatatgcgtgaggcttggatgggtgccacttcaaccccttccggagtctcttcaactacacttgttggaactgtatgtgtctttattttcttgagttggttttatgagcatagagtcatataaagactacagggggtgttaggttgccagccacactttgcctcaaatgaaatatggttaggcaagttgtggaagccacaaaagtgtgatgaacaaattgctggccacaaagtgtgacaaagttaggctgaaagatgtgtatatgacatatgggacatactattgaaagtgtgcaagccacatctgtggtagtgaaccaaacacatgcataataaactatgacagctaaaaaagtggtgtggcaaagtgtggccatgaaccaaacaccccctacgtatatcaaaccatgtttgtgacatctaagtctgatattttattcttgaaggtaccccttgctggaacacatacagaaatatatttggcctcgattgtgcaagcttgatcaattgatattgtaagttaaattcaagtagtactttggaatataaatattcgttaactgggaacatttagtaacttctctcattatgcaggtatgagcttcactaccaaatgataacttttggaaaggtgagaaacacaaaatatatttaaagatcaatcaaggaccagatttgtagtgaactgactagctggtttgctttcttctgatttcaggttttctgttcaaaaagcaagcctaattgcaattcatgtccaatgagagctgagtgtaagcattttgctagtgcatttgcaaggtaatactttgaaatgcttgatatcctaattaatatagctattgctatcttctagttgtcaaactttaatcgcatttctgcaagtgagtctcaattttctaccatttaagctttggtcagctaatgcacttcttttttgcaaaaaaaaaatgttaaaagcacttcatattaatgtcatttctattacttggtatggtagaaagaaaagtgttctgtgtggacttttttcaaaaaaaattataacgatgtgtttgaatacagtgcacggctcgctcttcctggaccttcaaagaagacttctaaaccagaatatccaaatgatgcagagagcagtcacaaaaaatacacacattcaaggcctatgggccaacttagctggaacacgaaccatcctgggcatgtttatggtgaccaataacaacctatcatcgaagaaccatcaaccccagaacctgaacctgacattgcagaggcaagagaggccgaaatagaggattttttcagtgaagatcccgatgaaattcctattataaatcttaatgtcgaggagtttgcacagaacttgaaaagttatattcatgcaaacaatatcgagatcgaagatgctgacatgtcgaatgcactggttgccataagccctcaagctgcttcagttccaacttccaagctcaagaatgtcaaccgcttgaggactgaacaccaagtgtacggctttatcttgaacaaaatcaatgccattgagagtaaataaagtttttttaatgtttccatcatctatctttctaatatgttttatttcatttgtttgcagttatgagttgccagactcacaccctctactggaaggagtaagtttgtagcagatataaactaccacctatgtcccaaaatataacaacttctcgctatgtacttgtccaaatacatagccaaatattgccatatttctagattaatgcaagcaataagtttagctctgcttgtgtctgtgcagtttgatcaaagagaaccagatgatccctccccatatcttctttctatatggaccccaggcaagctcatgtgctcccatccaacctttactcttatacaggttatactgatgataaaaatttcaacaggtgaaacggcacaatcaactgatgcacccaagacattttgcaactccaaggaaactggtaaactctgtgagagttcgacatgctttagctgcaacagtacacgggaaatgcagtctcagaaagttagaggaacccttctggcaagttccctcttgagagtcccataaatatttatgtgttgtgtacatattaataagccattgttttcgttattcaattgaattcgagcagataccatgccgaacagcgatgagaggaagctttccacttaacgggacatattttcaagttaatgaggtgcgcattagctctcttaaatacttgtcttagccagcaattagaagttcaaaagtctctttttttttcgcagtaatagaaagtactccctccaatcatttatatttgacgttagaagagctaaactcaatcctcccaacgtcaaatatattttaccagcggaagtaaatatttttaatccatcagatttatatggaatgcatctattgtgttgtaggtatttgctgatcactactccagcaaaaatccatttgatgttccacgaagttggatatggaacctcccaagacgaacagtttactttggaacctcagttcctacaatatttcgaggtattgttcctgtaattaaccaagtgttttgactttgcatgaccaaattgtgtaaatttgttctctgatatggatgtcagatttgaaagcattacaccataagactacaataaaacaatagcataggttcgtattcttggttaaaccattaattggcagcaataacacagccatacaatctctgagcctctggcagaacaaggaaatcggttagctaaataaggttattacctatgaactgcaagccctgcatatcaagttcaccattaatatgacctagtgtaccctttttagataatggaagaacaactccctctgccttttcgccttttgccactagtagaagctttttaagtagagtgcaaatattccaaaaatagtagcttatctgattttgctattttctcttctaagacatatattctctatctaagaggattaattcaatgcaggtttgtcaactgaagagatacaacattgcttttggagaggtacacactttatttgcttacgcacattccttttttcaatgtaggtttattttataatatatgctgcaagcaattagttatgcacttcactaattactataatagtggttatatatagtgctatttttattatgagaactgtattggaggttaatttcatgtttcaataagctttttttttttgaaaagaagtttcaataagctttgattattctaagtcctaccatagtgctgcatgacattatatttcgtgctggttgtccaagattaaactatttggataagggaagagacacttgtagtactaagcaatgaaacctcactaaatttggtcccctagctacttaaggatcccgttagctccttgacaatctagggcctttttggatcaatgccattgttagccttgccttcttgtctctctctcttttttgccatttttgcgatggcaagattagtaaaggtgcaagtttggaatgttgtcaaaatttttggcataagtatgtaggttagtatttcgcttggtgccaaaggatgccaattttttttgttatagatcaaatgagtaccaattgttttagcaacaccaaagaatatttcctactactccaaatatcttatcgaagctattgtcctaagtcctgaccacaagtcatcaccttcttctcttagtgacacacacaattcaagggttaggctagcacttttgaggttatcatgatcttcactatgtgagaattgtgtacgtttattttcatagacaactagacgatttggtaccaaaccaacatgattgttgcatatcacttgcaagatctacattgtcatctactgtaatttcgcaaaatcaatttctttactactctcatgcatggtgaagtagggagagtgtaacaaccacacttaggctttgttcttcccccttctttcccagctctccttcgtcttttccgcgcgcatgcttttcaaactactacacaatgtgttttttacaaaagttttctataggaaagttgctttaaaaaatcatattaatccattttttaagtgtgttagactaatacttaatcaatcacgtgttaatgagcaatattgttttccgtgcggggagatggagttagtggagttccaaattccacctcccgaactcagccttattggcctctgatgagaaatcacaatagtttaagtcaataactgccgaaatgaaagggcagcttaactaaattataaaaacaaagtcaaggagcataagcattttttttcctaataaattggtccttcaatttttgccataatcattttcactctaaacttcaataatgtactttaaatctctcaaatacaaaaatagtgcaacaagtatcacaatcgcatgttgttgcctcatccattaaagttgtgttctttggtgcatcttcccaactctacttccttgttttctgcgcgcatgcttcccaaactactaaacggtgtttttttttcatatatatatatatatattacataggaaagttatttaaaaaaatcatattaattcatttttcaaaaataatagccaatacttaattaatcatagctaatgagtcacaccattttgcgttagtgatgagggattaattcccatccctttgagccgaacagagccaaataaacttccaattctttatcaacaacattcaaccatgtctctttgccttcgttgttgtttctttgtctccattacctttggtgcacttttaaaccaccttatacccaatgtcaccaataatacatgggagcaacaatatgcaatttagctatcgatagttttgctagatttaaataaccacatagactgcaagccctgcacacaaaaaaagtgaatatttgggaagaacctaatatcaaataaatagaaggggtgagcctttgaacctaggccggcaagcccaccaccttgtggagctagccggaagacccctgggcatttctcttccacatggtttcacacactaagcatggggtacatgtgaagtgcacacataagataggtctatagagaagttctcttttacctcttgccacacctccttatccttgtgtttagtttattgccatagttgtgacttgccacactttcttagcatcttgtcccacatgtagcttacaatttgtagaccacaaaaggtgtggcaatccaaatttgactaaagtgggttatggcaatgttaggtaagaacaaacaaccccttgaactctgtcttgtccttgattctctgcacctagggaaagtagcaatgtagtgtgcatggactaggatgttgtagtggactcaatctgtcaaaggtgagcatatcaaagcataataattgggctcaaggttgggcctgataaattgaccttctctctttgtccatccactcttctctataagcctagttaaattttgatgaaggatgtatgatactctttatgttcaaacaattggtagaagggcatgataggccacaaaatacatatggctagggttttatggatctacacatattatattatagttttggaagcaatcaatcacagttattaaaaccggacaggatcaatggtttaactggaaaaccagaataaaatctcaacccaatatggtttcctttaaaagtcagagatgtaattgaacaactttagactggatgaactagatggtttttagatgaactgggcaataaccagggcaggttagattggaagagggataaagtgcgcttctttacgggctgagcgatggctcaatttattcatgaacacgtgctcatagaaagtccaaagaaggtagcgggggcaggattcaacccctggtcatcctgccagcccaccgtttgtggtcgaaatcacacatatattttatattatttaacaatcttggttggaccacctagaacgccggtcgaactagtagactggtgaaccgagagcttaaccagttcatacaccggtctgggtttaataactatgcagtcaatgcactgtattattatacatctgaagggctaaatatgtttcatacgtaagataatcataagccaaagtgagagtgggtaggactaacactcttgtagctacttgacctatcttccctccttttttttatatattcatgaacttgaactaaaacaagtttagttgaaggtttccttcttgggttatagcattatctatcctctaacttgttatccatagcccttatttaggcttgtcattgacaatgcaccacaatcgttttggtcttccttttgtctcccatcactatggctgaccaccagcattgcaacctcagttctcatactaccctggcctttcattttttatggagcctatcaaaatcagcctcgcttacattcaaatgattcttcttgtagcatgtcctttgtcatcctatttgatctcctcacgttggctgagcttgacataaatttccataagtatcacaccacaaagaccacatagagattcggacaaattttaaaaaaaatactacacaatcgagttcgctatggttctacaatatgtgtcatcgacatcattgatcttttgcacccacaactttgttgttgttcacttgttctacaatgtgtcaatgtcaccagttgttagtttttttttttaaaaaagcccaaatgccctaacactcattgaggcaaactagcaaagacccaatgagtagggatgaaaacggggcggatatttcccgcccgcccgcccggccacattatttcgggacaaattcgggtacccgggacttttcacggatatcgggtccgaatacgggtcttttttggtggatatgagatcgggttcgggaacatatattgtatccgatggatacggattatccgataaaaaattcgggttttacctggataattatgcggatattacccgtattatgtttttgtgaggcactttttggtactatgtattggttctactatgatgtattataccctattttttttctaaggtcctaagggcctaatataatcgtattatggatatatggcattgtcaaatggttattgtctatgtgatatataatattgttgcttcgacttgatatccgaataaatattcgtaaccgatagtgtatgtatccattttggtatgtatttgttccgtatttttgcccaacattatccgagtttgtatccatattcgatactatctgtgaccggcccgattccgattataaaatgtgggttaggatatgggaagggtgagatgcttgagatagtgcccaagaccttttgccatcaccttcagcaaggggagattaggaaggaaaattagaggaagggataatgcgagacccatcaccgttcggattgagccaattgtgatccatcatcatgtgtatacaagagtgcatcaggcatttttggtccacctttatcatcagattcctcagcattgttgtatccaactaaataaaaaccaccaccttggtagcataaggcgagatttaaagaaaaaagcaagttgttgtcgtattatacttttatagtttgtagtgataacaaaattggccaaagtttccccttggggaaaatagcaagaaaataacttttttataggcaataaactccctatggagtactatgtttctgtgcatggttctgcaggcaaatctatcatacaattttgccgtagctttgtcaccccaattaatattaatagcttcttaaagatgctaccagaattcaacagccttaatatttagtaactagaaagttgtactttctgagctaggaatcttatacatggtgattaattctctcaaatccaatcgcaggatttgtgtgcgtcaggggctttgatagggaattgagggcaccaagaccgctttacgcaaggcttcattttcctgctagcaaggcttcaagaggcaaaaagcctgcaacagcaagagaagaagaataggtcattgaagaggccaaaattaaagaatacatataaatgagctaagcaaagcatggatagcccccaaaatggagtgttgacccctaacaagtgtctgaatcatctctaagaaaatgacttgtcagatgtagtgaacgccagtaccttgtgaccttgtgatgctgatgtaactcaattcagcaaatgaacaatataggtcttagtgcagccattgtaattgtattcgtcacactaacaattgttgtacaacagtctacagaaggatgaccctcaggtatagaatggccatacacgcctgttgatcgtttgtataggcattgtaaactcatcggtaatcagtcataagaacatgtgtttttcgaggatgagccctcgggtgtgcttcgagttttttgtgtttcaagaataattaatgaagtataccatccttaagagtcccaactcgatcggttagtacacatttcatatcagtgtgctaaatgtgacctgttgttatgaaatgtgttatgcacattaagcatttcaacttgatcgattagtatacatttcatatcttgtgttgtgtacattaagcataagcacacagaacaatatgtatgtatgatttaaacaccaaacaaagattgaagccactgagcacataataatgtcagtctggcacctaatgacctaaagggtgcattcaaaccttcggtttggtttggaaattttgtggcatgcaaaacgaggcaagctattagcgcatgattaatggagtattaattaatataaacttaaaaatgggtttatttgatttttcaaaaaaaaactttgatataaaaagtttttgctaaacagtttggatagtgtgctaatggaaaacaatgaagttgcaactgccaaacaaagaaatgagcggggcctaagttagaaactagtttatcctcaaccaatatagagaacatttcaatatgaaaataaagtcgaacacatgcagcatatagaaaacagttcacagggtgtttgcctcttggtaaaacttttaacatcaagaaagaaagaaaaaataaggcaaagttttgttcattgaaaatcggtgaaacacacacacacatactctctctctctacaacaccaacacatgaaactactccacaaatagatctggcctctagttgcgtgaattccattcccttctctaggatttatttatgaaatggaccctattcggaaatacatctaagaaactgatgaggacttggctaaaacttatgaaatttacaaaaaaaaaaattaaggcaaaaatagtacgtcaaggccggctagatcccatccacctagttgattctaccttttggccttgtttcaaagcccggaagtaaggtccaattccctttggtaggctagcatttcgaactaaaattgacagcatattcacatgatagactgttattgggccgcaaggcctgtatgtctcacattccaatctaatggggcctaccaattgggtcggcctataggcacacatatcccaggccacagcgtatgcagtgatctgtgagcccctggtcaccctggatcgataattatttttccttttcgaagattggctgataggctattaggctgatctgtggctcatgtgatatattgacttgtgcgctatggcctacgggacacaattttttttatattgttgtaaatgtaaagaggctgctagatatcggtatctcattccaaatcatggaacagtatgctcgcatccataccatgtgcgtgacatgcagacctatttctcctcccgcaaactcaacatggtagggtggcagggagcataaaaccatagtgcttgatatatagggtgagcctcacgcattagctataactttctatctggtttgtgctaggcccacgtgtgagatgtacaatgtcgtgcatgctgcacatcaacatgaccacttatcctttccaaaagttagccaaactgactcaagtatacaaatatacaagaaaactagttattttttaggtgagttacataaaacaaatatagcatgatccttgtcagtctggtaaaatcttcccatgttagtaaagaaaataattattaaacccacctaataataccagctatgatacctgcatgtaccatgatgacaccaactaggtatcagcaatgatagttatcatgtaccaacacgttgatgatatttgtaggtaccaattatactcataagtattgctgatgatatctgttggatatcattgaatgttgatacttgctatgtattagtgagtcatgatatccgccaagtgtcggtgacagatgatacatataggtattggtgatgatacctaccagtaaatagatgattttttttacaggtacccatgataatacttgcatgtacctgtgatgataactaataggtatcagcgatgatatttattaggttccaatacgttgatgatacttgtatgaatcaatgatacttgcatgtaccgataatgatacttactagatatccatgagtgttgatacctgctagatattggtgggtgatgatattggtaatgatacctatcaggtattggtgatgatacctaccaggtattatctataggtaccagtgatgattcctatcaggcatcagtgcatcgatgatattatttgcagggacccatgatgatacatgccaagttattgagtgatgatacgtataagtatcagaggtgaaaaatttttgggattaaatttttaaaggttgcacctaaggaaagcaatcgatttatactagaaaaaatagataaaaataacaagaaaaaagttaaatagccaagaattttgaaggtaaattttaatttcctttattttgactgtcatgtttcttatcactggcattttcctttgtgaagaaaaaggaaacaaacttttgcctgccgcgcgtaagaaaagatcgatcttgtattgtacggatctaaactgtatagttgcatcgctggtaaataacagaaataagaaatgatccaaattgtgggggacaatggacgaagagagattttgagtacaaaatctattaggtttaggtgggtctatccggtctaccctctatccctttgccttttccgtggtgccactcacaatgcatattgaggctagagggtagggacctatttatagactccacttctagatatacactatatttgtttccagtacaccgttagactcctgaaccatgtcaccggccacgatcagacaattcagttaaatgaatctacaagttacaagcacgcatgtgtgagtcatatgccatgattacattgtatatgcgattaattctaatataatcatgtgggtcaacagcttaccgagccaatcgtgtaaacaaacccagccatttcaccctgtactgtacccgggcataaacatatataaattccagtagagtatatctctattaattcctctagtgtattccagtacagccgtccttggcactttgagtattaattcctcgagttaaattccgcatcaataattccttgtcacatgtagcataaatactttccacattgagttaaataaatatcataatatataaatattagtataagccatataaattaaaaatccaataaaatcatcttcaatttttatgatataatagataaagaataagttaatagattgtacatgtgctgaattaaataggttagaaatcatagtgcagcttaattaatataaacctctcggagtctctcacaacgtacgtacttcccgaaactggcaaaattcgttcgccgtcttaattattccgatttcccacctgattcgtccgatcggtcgtcggatcaactaatccgaaacggagacgaactagtaaatcctaaggcaggaggctaatcttcttcttaattagtaattcctctacaaatatacaggcgacactacgcgatgctcttcgcctccaagtgatcgaacacacgcacaccaaccaagctagcgatcgatcgagccccagcgtacgtgccaattaatggcgggagcggcgtcgggctcgtatcccgtcggcgtcgcagccgtcggcagcgaggcgcgaatttttcaggatttatcggcgttgtgcttctagtggtaggtgacgtacccgtcgacagcgaggcgccagtggtgacttcgtcaatctctccaggatttgccggtctagtcttcgaagatgctcataggattcgttcagattgggttattctcatagggttcgtttagattgggttatttgagagctaagttccctatttgatgggctaagttcccaattaaaaaaataacatatagaggcttccaaaactattaaaaccgacttattatgcctcgtaagttgtttgaacgacggtttcatcccacacgtcgcatatgtgacaggttaacatagttttcatctatgttacatagagtgtatatgatgcttaagtgacattatagttagtaaaaattaattaaaaataaagtgggaccaataagtaaatcattcatccaaaacatacgatgagatccatctgtcatcccctcctctccactctgtttgtttttttctcctccctatccccttgctatagaggtcgaggtgaagcgtgcgcgcggagcacagagtaggcactacccgcataaaattttatttgctagctcattttttacatggtagtataacatttagaaataaaaataaactagaagtaaaataaacgggcaaaaaaaagggagtagctatatttatgacgcaatattttttaccaaaaaatagtcaccatgtatttacattgtaattttctaaattacatatgtaattttagtgtatttacaatgtaagtttcaaaattacatatataagtctctaaattacatatgtaagttcaatgtaattacaatgtaagtgcaatacaatgtctatattttgcattgtagattatatatatttatatactatacagatacatatgagtagaaccataaaaagcttaaactaatgaagcatgttaagttttaattaatcgtgtaatgacagccgagagatgctaaggacctgagtagaccgaacaacatctgacggtcagaaattcgactgtaatcagccataaaatatggcgacatcattttagcaaatccgaaaaaaaaacgctagcctgtcccgcttgcatccctgagagagaaggacgccctccgtgagctcgatggacagatccattcaggaggggccatggtcaccgctgttgccatctccctcacctgtcgtcccggtaaacaaagaacctgacagagaagccattgcggcacatacaccctactcagcgcttaccaccctataaaaaatgcaaccacggtaatgtgctctaaaatatactccctccgtttttaatatataacaccgttggttttttctatatgtttgactattcatcttattaaaaaatttatgtaattatcatttattttattgtttatgtttaaatgttcttttaagcatgacttagatctttttatatttgaaaaaaatctttgaataaaacgaatggttcagaaaattaacatcatatatcttttctttacctacttaaaaaattcgtagtgtttctgtcgtttcatttgacttgaaatattcgtagtatttttttcgtctcacctggcataccgtgtatcacatgggagcataccacccgatgccaatagtgcccgagtccgattgcatgaaaatagaaaataagaaatctaatctaacttgccgcacaacccaagccactaagcttcctattttaactttttttcttatttatctttatctttacctacttaaaaaaactggtagtgttgttattgtctatcaatccaacggtcgtgaccctttgtccaacagatccctactacttgaaacctcctcctcgctttctgctccgcccccgctacctgagttgaagccagagttgatgagcaggaaagaaaccatgttgatgataattgatttgttgatgaatcggatttcaagcccaagaggagaattgatttgttgattaatcggatttcagtcaccctaaacaaaatcggtattaccaaagaaaaaggaagagatcgatccatgatttcttgagctgaggtgataaatcatgggctgaggtgatttggacacgatgggcagtggtgcaatgcgtggccaatgtgcagcaacgtgcggctgcaagagagctctcggtcggtgccggctactttgtgaggaggcggcggaggggaggtctggcagcggcttcctattttatcgttgttgcatctttacaatgactagtaagagtacatgtgcaacacacatttttaagagtacacattattagaaatatataataaaatataataattcgtaacaaaaaccactatgccaaaaaaatggaaaataaaaaatagatctaaaagagtatcgaaggcttaaaaagggtggacatggtcaatctctgccgtctaacccaccaacaccatcatcacacacgcacaactatatattacaacttagagcaagttatatagtagagatgataaccacctccaattttacatcatgtacttgttaattggaatgtaatatccacatcatggtttagtaatcttatattaccacgaaaggaaatcacataaataacaattaaatgtttaatggataggggcatctctatctttttagaaaacaatatagataatccataaggttaaaaaaaacttattgtaatcgcatgaagaatcaagattctaagtgtttcagcctttttaagcctttgttattgtctatcaatccaacggtcgtgaccctttgtccaacagatccctactacttgaaacctcctcctcgctttctgctccgcccccgctacctgagttgaagccagagttgatgagcaggaaagaaaccatgttgatgataattgatttgttgatgaatcggatttcaagcccaagaggagaattgatttgttgattaatcggatttcagtcaccctaaacaaaatcggtattaccaaagaaaaaggaagagatcgatccatgatttcttgagctgaggtgataaatcatgggctgaggtgatttggacacgatgggcagtggtgcaatgcgtggccaatgtgcagcaacgtgcggctgcaagagagctctcggtcggtgccggctactttgtgaggaggcggcggaggggaggtctggcagcggcttcctattttatcgttgttgcatctttacaatgactagtaagagtacatgtgcaacacacatttttaagagtacacattattagaaatatataataaaatataataattcgtaacaaaaaccactatgccaaaaaaatggaaaataaaaaatagatctaaaagagtatcgaaggcttaaaaagggtggacatggtcaatctctgccgtctaacccaccaacaccatcatcacacacgcacaactatatattacaacttagagcaagttatatagtagagatgataaccacctccaattttacatcatgtacttgttaattggaatgtaatatccacatcatggtttagtaatcttatattaccacgaaaggaaatcacataaataacaattaaatgtttaatggataggggcatctctatctttttagaaaacaatatagataatccataaggttaaaaaaaacttattgtaatcgcatgaagaatcaagattctaagtgtttcagcctgaacaacttatttttacattcaatattcaaaaatacaatattaaggtcgcatttaagaagcataaatgatcgtagaagatggtatctacagcaaactgaagaaccatgattttctagatttcatttgctttaggcatatgatatattagaagccccagtacctgaaccaaaaaaagaaataatcaaaccggacaacgatctggattacacagtaaacaatagaagtcatagtggtgtcctcccgtcacaggctttgctttgtttatcctaactttgcactgcaggttaagtcatttcgaaacaaaaattaaatagtacaaaacacaaactgtgatagttcatctacaccaaaattcagtagatttgcttagcacttgagatacagaccgtgcacatctaaccagattatcattaacagatccttgctatatatcctcccaacaaatgaaaatattatacccaaatattgaacttaatttgctccactccattactgcaaagctagcctaggaacaagcaagcattccacagatcctcgacaaattgagcacacggggaggatgaagaggaacccacttacaggagaaatcaacttgtgatgtaaaacattggagtttttttacctctcggtacctacaatctaaaccatccatcgcgctagatccaacggatgacaatgcttagtactgccaggtaccaaaatcccttcggtggtaccttccccttcatctgcacgcgttaaagtggaagggaaaaattgggttttctcatggtccgttcaccccgagtccatgccgctcctccccgatgctggcaagccatttctcccgatccccttgaggcgcctcctctacatctgccctccatggcgaaggcgcggccaagctcgccggccatctgagctagctagacaccttggcctgcttgctgcaacctgccgccaccatcctggcccatcctaactcaactcctccttcttgccgtcaggctagatctgcccgacgacgacgacctcaacgccacaacgaagaggtggccatggcgatgagctcagcgcggtggtgacctcagggtgccatgggcttatgtgtggatatcaagcactatgtttatagaataattaattttgatgctagtagagtgataatcctatggtgtaaacaatgtggtctaatctaggttggcaggaataattggttagatcctgcgccacgaatttctgggttatatttctgacctccaagcaatgggaagttttatttctgacctataagcaatgaagttctatttcagaccacctgttatggtgtaagcaatgagaggttttatttcacctttacatcttttaagtggaaaagggaagccatgcgaggaatcaagtgtggtgtaactgaacctagaggatcaaaatcaaaggatgtttccatgtggagagtaatagtttacttttgtatgtttatctcaggcatagccctgtcagtatgtaacatcatgtattttgataacatgtaacctctgaatgattatcccttaaccacataagctctggatgatgatctcttatccacataagcttctacatatctcttgattctgaatttagcagccaaggatgtctgttacacgagaaaggagatgtatttcagattctgattatatatatatatatatatatatatatatatatatatatatatatatatatatatatatatatatatatatatatatatatatatatatataagaagggcccttgttaagaaaggagatgtatttcagatttttgctagtgatattcttacatcttcactggctgtggagagtaatacacaacacaggttaacaatgttctgaacttttcataagtcctctgaacatttaaaattgcaaaccatcaaacttgctagagagccggaatgctcattttattcataaaagcagaagcttcacaaacagttaacatctctgaagcctgaacttacaaaatatcctctatgatcgtattttcacaagctgccagttatataagcctgaacttgcggacacggaattgcccgataggcacgtgctcactcagcagatggcggagcaagaagccctcatcggagacgatcctgtcgaccagtgtaggaatgccgtcgccgcgggcgttcaggaggacacacgcacatggcacgttgccgtcctccttgtcatcctagtacgacagcttgagcaccgtgaagctgtcatggcaggcgataagctccgcatgaattgcactatggtggcggcgcccgtggcatactggtggcagcggcgcccgcgcgtggcatactgcaactgtcgcactgaggtgctgaaacggggttggggatggatttgagggggattggaagtggggaacgagattggagttgggaacacagcacaccgcctgcttcagtgcgacggcgacgcacaggtgcccctgaaatcggcggaaggacacatagattaggggatgatatcggacctatctaattgctgctactgtcgcagccgccggaggggatgaattcggcgcatggcaccacagaaggtcaggagcgtcacagcctcgcgggcgtggtttggttcgttccctatcctaccctcgatggatgaacggtcagatttagatcggtacctcacggtacaaaagtacctgctggaggtatgaaatgctggaccggagcaatgctcaaaacattaatattagctaagcagcatttaggtggtgtttgaatcttctaataaaaatgaaaatgaaaatgaaaattaagttttttacgtaaaacgatgtgatattaacatatgattgattgagttttaattattataaacttaaaaaatagattattataatattttagagcaactatcattaggacagaaaaaatacagaccgtcccgtcctaattctacacggcatcagctactactgaatactattttttttccagttgactgctcaacaggcgaccctttagcttgaatctcccagaggcgaccgccttggctcgaccgttgagcaactcctccagccgacgcagcatccccgccgcggccgcctcgcgcgcggcgtcgtccatgccgccgtcgcggcacacggcgatgatcctgcgcgcgtcccacaggcggttgacgaagccggtggcggccatgaagttggccatcaagctccggtcgatgcgcgtgtccttcccctcgtcctccacgtcggccatgtccgggtggaagaaggcctggatcatcctccgcatgtgcacccggtccacgaacccggccgcgctcaccggcgggtcctcctcctcctcctcctgcagctgctgctgcggctcaggcggctcggtggcgtcgaggccgacgaagagcaggtggtccatggcggcggtgcggtcggcggagagctgccgcgtccattccagctccagctcatggcagggcttcaggtaggcctccacgagctccctgatgtcgtgcttgaagtcggagatgcagcaggccatgtagaacctgagcagcacttgcctgtgcgtctcgcggtctaccttgagcggcgggaggccgtcactgccgtctcgaagaagaaccatgccatcggcgtcgtcgccctcgctgggaagaacaatggctgcaggatccgccgccattaattgttaactgcaggttcgatatgcacgttgttgatcaccgacttaattgttgaacattgcgtatagtgttcctgtataattaatttatagacgaggatcaaagagatcgaagaggctatctagcctagtttacccaactccgatccgatacggatagatcattagataactgaatcggaatagttaataattgaatcggaatcggattagatatcctagctagttgattttgggagttgtaaggtggatttctataaatctggatcattaatttctttctagcaggtagatgcagccgcgttacattatttttgccgaatcccatgcacgattaatcacactattttgatttgttatcctacagtgacgatgagctatgcatatgcataactaataaggcaatgaataattaaagttaaatggcataatgaatgcatcatgcatgtgccatgttttcttcttggcgttgatctcggaagaatctaaaatcgaacgcccgatttatcaaaaaaaataatctggtgatcaaatgtttcagttgactaacaagtgaaacattaaagcagaaaaatcagcaattgaaacatctattatctactaaaattccattaaatttcctataaacgctctaaagccgccacgtgtaactcctacaaacactcctaaattgttacgtggcattctaataaattagagcaattcctaataattctaaaaaaatatctaaccattgattttagtttaaatacgataaacccattattttccaccattggatttaccttaataagaaaaagctaacaaaaaaaaggcccacaggttacatgcaccagtgcacgtacggtgcacatatgtactgatgtgcatacctcctcccctcctactcttcatgaaaatatattttgtgataataaattccaaacaattatatgatcataattatatagctaatattttaccacgttcatcattagattatttacaacaaaatttataattcaagacccaaactatctatatttaataagtaaaagaactaaaaacacatttatataaaaaatcatatagatactttaatgatctatttaacaaaacatagcttttaatagaacaatatgaaacacataaagttaattaataatgttataataataagcaatttaattagaaaatagatatttaaccagtatattactttgggtcattattattttacaaatatagaaaactcaaattggtaaaactattggatctatctcaaaagaaacaaaacttctcccctcctcatgtcgtatgtacatatgcacgtcttttggaaacaagaccagaatacgtccatctactatatctttattgatccatatgtaaatatatatatatatatatatatatatatatatatatatatatatatatatatatatatatatatatatatataacaaattgtgttaatgtgaaccaattaaaaggagtgctagcttgatggtacattattaacaataatagttttccaagattgtaaaaaaatagcctcaaaacattcaatttaaaacgaaaaacacaccttacttttaatttgaacttaatttgttagatattttatttaaacaaaataagtctaccttatttttagattatgaagcagaaagaaataattaattaattatatagatgaattaaatattacatagtataaaggtaacaaataccaaagataacttatttaagcaaagccaagaaataaatttataaaataaaatgtacttctgaagcttttggcaagtgctacatgtttaatattgaatcattataagtttctcaaatacagtgtatgatatacatgcccgcgtgaatgcgcgggctagcatcctagtttacaaaatttatgaaacacaataagaacatgtgttacaacttgcacaatgttgctgtcacatatgaaacaatgagttttaacgtactgaaacatatgtttttctttcatcgtcatgcgatatcttatcgtaaagatttagttataacaaatacaatggtataatcgaaccatagattggataagtagtttaggagaaaattcattttaaaatctactaaatccatgcatggatggataaaatggagagagaagcaggagagagagtagagggagatagttgtgtgaaatttatattacacaatggaacatacattgaaacatatggtaatcgcatatcaaaacattgaattttgataggttgaaacatacatattttttttcattagaatgtaacaatgtgatatcttgttgtaaagattttgttacgacgaatacaacggtatgatcggatcgtagatcagataagtagtttagaagaaaaattatttaaggtgaggagggagggagaagaaactaactagtatctataaccccatgcatgtagatgtagtaatagcagcgcccgattttctcgtctaatcgggcgcccgtatactagtattctccgttgatctctcctaatgatatattcaacctactggcagtaatattacagtctccattatctaagaaataagtaactactcatattattctgcttcctatttgtgttatattctagaacacacatgccaatttccctatttctgcttctaaaacactcggaagtcgaacaaacactcggaagtcgaacaaatataggatatgccaacgcacagtcgcacacccatgctcactactacctccacacggatgcttactactaccatactagaagaaaaagcgcggcttcacactgtaagatcgaatcataggaactaagccaaccagagggggctgaatggttggtatatccaaaaaccaaaaacttttagcgaaaataaaagttaccctcgaaatcgatggatcgtggtatgaccgtagttgtcctgccggtctgaccgcctggttgccgtcgctctgaccgagattatatctccggtccgaccgccgagatcagctgctgctcgttgtcgccggcgccggtctgaccgccgtgctcccgccggtctgaccgccgcttgtcgccggtctgaccgccggtgagtcgccggtctgaccgccggtgagtcgccggtctgaccgccggtgagtcaccgattagaccgccgaaacccggtgaaacccggtgtctcatttgattgtcgcatttacatttgtgcaatttacttttcctagagatataattgagccactatcacctttggtttgcaaaacataacttagttgcttagttagagttgaccctcaccaagcctaacaacttaggttagttttgattaggtgtcatttagttttaaatcgctagttttaaatcgcctattcacccccctctagtcgacatctcgatcctacaagtggtatcagagcttggtctctcttgattgggcttcaccgcctagagagaagatgtcgaacgaggtgaaccatgtagggaaggctcccatgtttaatggcacaaactattccacttggaaaattaaaatgtctactcacctcaaagctatgagcttccatatttggagtattgtggatgtaggctttgctatcaccggcacgcccttgacggagattgatcactgcatcctccaactcaatgcccaagccatgaatgctttgttcaactctttgagccaagaggagtttgatagagtgagcaaccttgagaccgcatatgagatttggaacaagttggcggagatccatgagggcacaagtgagtacaaggatgccaagcttcatttcctcaagatccaatatgagacattctccatgttgcctcatgagagtgtgaatgacatgtatgggaggctcaatgtcattatgaatgatctcaaggggcttggggcaaactacaccgatcttaaggttgcccaaaagatgcttagggctctaccagagaagtatgagacccttgtcaccatgctcatcaactccgacatgtcaagcatgacaccggcaagcctcttggggaagatcaacaccaatgacatgtacaagttgaagaagaaggagatggaggaagcctcaccttccaagaagtgcattgctctccaagccgaagttgaagacaagggcaagggcaaggtgaatgaagccaatgaggacttggaggaagatattgcccttcttgctagaaggttcaatgatctcttgggaaggagaaaggagagaagaaggggctccaactcaaataggagaagaaatagaagacccaacaagactctctccaacttgaggtgctttgagtgtggtgagaagggacactttgcttccaagtgcccttccaaggatgatgatggagacaagtcatccaagaagaagagtggaggctacaaactcatgaagaagctcaagaaggaaggcaagaagattgaagccttcatcggggaatgggactcaaatgaggagagctccgcctcatccgggtccaaggaagaaggtggtgatgatgcaagctccaagaagaagaagatggctattgttgccatcaaggaggctccatcactcttcgctccactttgtctcatggcaaagggctactctaaggtaacatctcttagtgatagtgagagtgatgatgattgtgatgatgtttcctatgatgagcttgtgagtatgtttgaggagctccatgcttataatgagaaggagattgtcaagttcaaggccctaaagaaggatcatgcttctttgaatgtcttgtatgaggagctaaagacttctcatgagagactcaccatttctcatgagaaacttaaggaagctcatgacaacctcctttccactactcaacatggagctctcattgatgttggcatatcttgtggatatgtctagctctagctttagctcttgtgtttctatttgtgatgcctcacttgttgttgagaacaatgagcttaaggagcaagtggccaagctcaacaagagcttggagaggtgcttcaagggtaagaacactcttgacaagattttgagtgagcaacggtgcattcttaacaaggagggacttggattcattccaaagaagggtaagaaaccttctcaccgtgccactcgttttgtcaagagtaatggtaagtattgctccaagtgtcgtgaggctgggcatttggtgaatgattgccccggtggtaagcctccaaagacatgcatgtttgattctcattatatggttaggaaggctcatgatggtagcattgttcctagatatgtgggttcccctatactcggtggtaaaaagaatgccatttgggtgcccaaagctttgatctctaacctccaaggacccaaataagtttgggtacctaaaagagcttgatcttcttttgtaggtgaactaccgcaccggtgggagccattgggtgcttgatagtggatgcactcaacacatgaccggtgatagggctatgttcaccacatttgaagtaggagggaatgaacaagagaaagtgacatttggagacaatagcaaaggaaaggtaattgggttaggtaaaattgctatctccaattatttgtcaattgataatgtctctcttgttaaatctctaaatttcaatttgctttcggttgctcaaatttgtgatcttggcttatcatgtgctttcttcccgcaagaagttattgtttctagccttcttgacaagtcttgtgtgttgaaaggttttagatatggaaatctttatttggttgatttcaattctagtgaagcaaatttgaaaacttgtttagttgcaaaaacttcattgggttggctttggcataggaggttagcccatgttggcatgaatcaattgagcaaactttcaaaacgtgatctagttgtgggcttgaaagatgtgaagtttgagaaagataagctttgtagtgcttgtcaagtcggcaagcaagttgcatgttctcatcctactaagagtatcatgtccacatctagaccattggagctcttgcatatggatttgtttggcccaacaacctataagagcattggtggtaatagtcattgtcttgtgattgttgatgattattctcgctatacttgggtgttctttttgcatgacgtctattgttgccgagcttttcaaaaagtttgtaaaaagggtccaaaatgaatttaattgcactcttgtgaaaataagaagtgacaatggttccgagtttaagaataccaatatcgaggactattgtgatgatcttggtattaaacacaaactttccgctacctactcacctcaacaaaatggtgtagtggagaggaaaaattgtacattgattgagatggcaaggactatgcttgatgaatatggtgtttctgattccttttgggcggaaaccataaacaccgcttgccatgcaaccaataggctttatttgtatcgtctcttgaaaaagacttcctatgagctaattgttgggaggaagcctaatgttgcctattttcgagtttttggttgcaagtgttatatttaccgaaagggtgctagactaaccaaatttgaaagtcggtgtgatgaagggtttcttctaggttatgcctcaaatagcaaggcataccaggtctacaacaagaacaaaggtattgtggaagaaaccgccgatgttcaatttgatgaaactaatggctcccaagaggggcacaagaatttggatgatgtaggtgatgaaggcttgatgagagctatgaagaacatgtctattggagatgtcaagcctattgaagtggaagacaagccatccacctccactcaagatgagccatctacttccgctacgccaagtcaagctcaagttgaagtggaggaggagaaggcacaggaaccacctatgccaccaaggatacacaccgctctttccaaggatcatccaattgaccaagtgttgggtgacattagtaagggtgttcaaactcgatctcgtgtcgcttcgatttgtgaacattactcgtttgtttcttgtcttgagccaaaacatgtagatgaagctctttgtgatccggattagatgaatgctatgcatgaagagctcaacaactttgcaagaaacaaggtgtggactttggttgaaagacctagagaccacaatgtcatagggacaaagtgggtctttaggaacaaacaagatgagaacgggttagtggtgagaaacaaggcaaggttggtggcacaaggtttcacacatgttgaaggtttggactttggtgaaacttttgcccccgtggcaagacttgaggctattcgcatccttcttgcatttgcatcatgctttgacataaaactatttcaaatggatgtgaaaagtgcttttctaaatggtgaaattgccgaacttgtctttgttgaacaaccccccggttttgaagatactaaaaatcctaaccatgtttataaactctcaaaagctctttatgctttaaaacaagctcctagggcttggtatgaaagattgagagattttcttttgtcaaaggatttcaaaattgaaaaagttgacaccacccttttcacaaaaatcattggtgatgatttctttgtgtgtcaaatttatgttgatgacatcatattcggttctactaatgaggtattttgcaaggaatttggtgatatgatatctagggaatttgagatgtccatgattggagagttgagcttctttcttggacttcaaatcaagcaactcaaggatgggacgttcgtgagccaaaccaaatacatcaaagatctactcaagaggtttggcttggaggatgcgaagcccatcaagacacctatggcaaccaacgggcatctcgaccttgatgacggaggtaaaccggtagatttaaagctttatcgttctatgattggtagcttgctttaccttacagcatctaggccggatatcatgattagtgtttgcatgtgtgcacggtttcaagccgctcctaaggagtgtcacttagtggccgtgaaaaggattctaagatatttaaatcattcctctactattggcttgtggtacccaaaaggtgctaaatttaagcttgttggcaattccgactcggattatgccggttgcaaagtggatagaaagagcacatctggtagtttccaaatgcttggtagatcccttgtgtcatggtcatccaagaaacaaaactccgtagccctctctaccgccggggcggaatatgtttcggcgggtagttgttgtgcccaattgctttggatgaaacaaacattgttggactatggcatatccttcaccaaaaccccactcctatgtgacaatgatagtgccataaagatagccaataacccggtccaacactctagaaccaagcatattgacattcgccatcacttcctaagagaccatgttgccaagtgtgacatagtcattagccacataagaaccgagaatcaactagccgatatctttaccaagcctcttgatgaaacccgcttttgcaagttgaggaatgagttaaatgtcatagacttctctaatgtggcttgagatggtgcaccatggttgcttcttttgcatatggtatatttgctcctatttgctcttatgctttggatttattgccatttggttcttcattgcaaaaatggagcatgtcacattaagggggagttttgcactcttgcatgtgctctacttacctttatatgtgagcaaatcaactagtggtgctagtagtattttcaaaatgcccaagtcaacataagtcaaaacttttgcaaatcaatgtaatttgaaaattatctcttgaaaaatgtttcaaaaggtttcctatatgttttccaagcctctcattgcaagaaaaatgatttttaaatgaaagtgtcattttggccctcttttgaagaatctagattcttagttttggccaaaatgagatttatccctaaaatgagatcgagaaggaatttgagaaaagtttcgaaacaaagttggtagagaagaagatttgaaacgtttttggtattcaaacctatttcaaaaaccaaatctttcaaaagttatttgaaaacaaatttggccccaaaacccctatagaccataaaaggtcacctcctagcacttaagtgagttttgttgcaaatcatcataatcttgaaatattatgggtggttagcaatatttaaactcacacatttcaaaaattgctccaaaaatctttttttgttgaattttattgtgtagggggttgcaggcttgtgcaagggttgtgcacagctggcagggggcctggcggtctgaccggcgatatatgcgcagtttgaccggccggcaggtgggcccaggacttttgtccttttccttctctcttcttcccctacccgaaccaatcttctcccattcagccatcttcttccccaactcgaaaaaactcctcctctctcctctcccaaaccctagtcacctccctccaccaaatcccctcggtttgaccgcggatttctctccggttacaccgtaagtgattctcctccgcttcctctctctattccatggattagttcgtgtttttgttgagtttttgatccatggcatggaaccctaggtgaagcacgacgtgttcttcgatttgcaccaatagagggtagtttcttggtgtgattcaactcctccaactggtaaatcactctccctcttgtgcattctcttaaatcgatctatttcaccctagggctataggtagttgttccaatcttgatgaaataggtccaaccctttgatgttctagttccaatcttgtgcaatattgttctagcaatttttagactaaaatgagtagatgtgaaaattttttggatgcttgaacttgtgggaggaggtctgcccggagccacaggcggtctgaccgtgggtcaaccgccggtctaaccggcgtgtgcgcccggtctgactggccggcagccgtcagtctgatcggccaccggcgggcggtctgaccggcctggtgccgtcggtctgaccggctaccatgggcggtctgaccggcctgatgccgtcggtctgaccgccctactggctgcggtctgaccacccctacacaggatataggcaaattttcacctctccaaattgtttctagaattattgctaatatcctatcatcctttgttctttgacagtgatgcctccccgcactcgtcatggtcattgtgcgcccactccggatcccgtgagtgagcctgaggaatcgagcggagaggattacgctcaaagtgatgaagaggttgaggcaaatgttgagggggctagtgaggaggcaagtggagatgatgacagtggaagtggagagtttgaggatgaaggaagtgatgatatgcacattgatccctccatccaatttgttgtgaacatgaggaatccatcgcagtataccatcttgaggcaccatgatcagtttttgaggcctcgggacaccccggatccccgttttcacaccgctttccagaaaagtgtgtatgagcaagtttatgcagggaaagcttttgcagagtataagtggatttcttggagagacatcaatgagactccagagtttgagggcttgcaagatctcttcaggactgttggcattgaccggattgtgactcttaagcaagactacaatgaagatttgatccggcagttttatgctacagtgtgggtggctggggactatagtgagatgaagtggatgtctgacaccctccaatgttctatctctaggaggcaattccggcggctcctcaatattcgcttggactttggagatgacttgcatgaggagcacacccacaatccgctctccatagactatctcagttttatgaagatagagtgcggtacacacatgggaaggttgccggcttgaggaccatccctagtgtggttaacaggattgtgagagctaccatcctccctcgccttggcaacaatgatgacattaggggggtggcttggcacgtcatcgatgtcatcattcagggccgtcagttcgacattgtgtctctcatgatgcaagagattgccatctctaaggggaccttcactcagggtatctattatgccccttacatcatgaggttgattcaagacaagcttggggctgctgggcaaaatttgaagaagcataagcagtataagccccgccttcagcttggagctccccgtgctcctagggtggcgccctcctctcatcctggagctagctcaagcttagcacctcctcctcctcctcatgggtatgatccaacgcttgtctactgggcatgaagctttgcatgaggatgttcgtggcttgcgcacggatgttggagacttgaatgcttccgtggggagattgcacactagagtggatacattggattctcgagtccaaatgttggagagctcccaagcatttgtgtatcatcgttgtcatgatgcttctcatccttccacttcggcgcgtcctgcttctcctccacaagagtgaagatctttttggtgcttgatgccaaaagggggagaaaagtgtgtttttatgttgggttgggactagtagtagtgaggatagtgccctcatatctaataggttaaggtggtttgggctatattatgtgtgggtatgggctattactctatattgtgtgttatttgtcgttttgttaaactctatgtcatttggacccttcgtggtcttgtaatagcctatgttttatttgtgagccctttttaggatgttttgtgacttttgtgagttaaatggttaagtgatgtgaacttatgcaatgatggatggtgtatgtgatattgatgtatatgtgaccatcttatgcttatggattgaagttcacattgatatattgctaatgtgtttgtgcttgttgaaatgtgcattggctccatatttgttttttatgattgatatgcacatgtttaggggggagcttttgcttgtcaatgcaatatatgtccatgtgttctatgtttgattatatatatttgtggtgtttgtcatcaattaccaaaaagggggagattgaagcacctaggcccccggtgttaattttggtaattgatgacaaacactaattgtgaactaaccgttgtctttgagctatatattttaagttagatacacgtcatgtgtgcgcatggatgactattgatggattaaaatttgatggcacgaagcgaagaaaagaaaacggtaaaagcagtgttttagtttaaaaattgatcgaagtgaagggcgatcaaatttactagtttattttttagtttcgccgtactattaagaggggtaatgacctagcaaagagatgattttaattgccacattaggtcattatgcatttagatttgtactcgcttttcatcacacacacacaatcactttggatttcactggactcggcctgaccaggggcggtcagaccggccacatagtggcggtctgaccggcatgccctggccggtctgaccggccgcaagaaggcggtctgactggtgcatacggccggtctgactggcgccacatgcgcggtcagaccgaccccctggaggccgggatggagctgctcggggtggccgatacagagccgacagagccgtagtcggtcagaccgagccgatggcggtctgaccgagccaaggccggtctgaccgcccacacagcgccggtctgaccggccaggccgatggggccctctaacagcactacaacggctagttttctaagcgttgcagagtagcacggtctgaccggccacatacctccagtcagaccggcagagcaaaatgtttgggggatttcgcccccaacggctagttttggtgggtgggagtataaatactcccccaccagcagtaaggggactctcttggcacccaattcaattgcatacacccccttgcacctctctcacacccacttgagctttgtgttcatccatctagtgtgttagagggttgattagccaagagtcaagtgcattgcttccattgtagagctagtgtggcacttgattgatcatctctacgccgggtcattgcttgttactcttggaggttgcagcctcctatacggcttgtggaggagttgcctggtgacctctccgagaagattgtggaggaggcacggcgccggtttgtgagtggtttggagttcaccaccttcggagtgaaggaagaactaccctagtgatcaaggctttggtagtcctctccgtgggccggctcccgccttgcccaccccatgacaaaggggcgtgcggtggcttcgtggttgagtggtggagttgggctcgcctcaacggggagtaggaaaccggcgagtttccgaacctcggtgaaaaatctcttgtctccttgtctcttttgattgtcgcatttacatttgtgcaatttacttttcctagacatataattgagccactatcaccttaggtttgcaaaacataacttagttgcttagttagagttgaccctcaccaagcctagcaacttaggttagttttgattttgtgtcatttagttttaaatcgcctattcacccccctctagtcgacatctcgatcctacagtatgcagcctaaagccacgaaccaaactcatactaagagtcctaaacacctcaggaaaccctctagtctaagacacaaacttaacataaccaatcgtaccaaatttggactccttccaaattcgactccgcatctcatacgcacacaatacctccatcgtatgccatatggaatcttcaccaaccacgtgcttcaactctagccttagtatcccgcatgatatctgaccaccacggacatcgtcttaccaccaagcccactcccggtccatcatcgcaaatactctcccgagacatcgagtcacctacacatgaaacaaacaaagaaaccatattccgagatccagctatcccaaacttgactcattagtagcaaacaacagtattacatacgtatagtatccatctagaagccataaccatgaaacaatcacggatatccaaagaaacaacccgaaaccgaaaccgacacagcatcggccgatcagaccgtgggccagccggtctgaccgctacacatgagccggtctaaccggcaacaaccgcccggtctgactggtcccgacaaaacagcaaaccctgttcatcacctgaaaattgattatctccaaaaccacttcgacgataatctccaaatatcaaaaccaataatcacatatgccaattgttcatcacagaataagaatcgaaacacacattgatcttataatctcccccttaatgaacacattaatgtttaagagcttagcatacatatagcatatcatgtcatgtgttgcaataaaaagaagatgaacacatctataatataacaagcatgcattaaagtataaccatgaaccaaagattttacaattaagcttgaatcaacaatcaaaattcatgatttcatacgatttataatgcaacatcttaacaagcacataggttgaagaataaacactaaacacatatacctattgcatttatcattctttctcaaataacctttagcacaaaataaccaagagaatttttttaaactttttcttttcttgagcatttttgctcatatttttctcttttattccggatacgtccctgtcgtcaagactgtttccagggattcgacacccattattttgctcacatcgaatacgtccttgtcgtcaaaactgtttccaaggattcggtattcatttttttcatattttttattctctttttcacaatgagcaattaaagctatttgaggaataacaattcaataaagcatatatataaagcatttatagatcaaaccatatgctagcatcaatattgtatattttcttaattcaagtgaaagaaattaagtgtcatgcatcatctcccttaaaagcaatatctaagtctcatgaaaagactagaatacatataagctatgctagagacaaataaatcttcaaagtattgctagcatgcacaagaaaataccatatgcataaacaaagctctcttttctcaatttttttattgtcatatttttgcttgataaaaccatgagatacaaacttcccctcaaaacatgccaaaagaattcacgaataagcactaactccccctcaaaataacctccaattctccccgaacaaaaatcaagaagaaatcaaagattctgaaaaagacatccaattgcaaatgatatcaccaagattctcatgaattgacatgtatccacttgtattaataaaaactactacctcaaacactagcatttgaaaagctaataattaagaaagtagaaccaaaaaattatgtcaatcaaaaagtaaattgatgttaccatgaaacgcaatcgtcatctcaacattgaatgctcatggggagtatgccgccaaaatacctacgaacgagaagatgtcgaggcctccgtgttggggttagaaataaaaaattttggaatccaacattgagtcacacgacctgttgaaccagtaggtacaaaagcactgacaaaatcagaattagacttacctgaaaaattacgttttcgcttcacaaaaatctgatttgaatttcgcgaaaaattgccccgaggccggtctgaccgccactgtacatgcggtctgaccgggcctggcaaccggtctgaccgccggttcacctgcggtcttaccgctggccgatctgaccgactggtcagtgtcggtctaactgtggtcctcgaattaaaacccgatttttgccaacgtcgttttgcaaaagcaatttctctttcctttttctgtttatgggcaagtctaaaacaaaaaccaaccaaatgtccatcttttccacaaaaagaacaagtgtacttctcacgacaagtttgtgaagtagatgatttttaaattgatggttttgcaacaacagaaggttttgcattcacaacatttgatttcaaagaagatgcattcaaagaagatatgatgccagcagatttaaacacagtattcttaggctcagtttcaatcaaaatttcacctctcccagcagtacccaaaacagtaggaggatgtctagcatgataagcataagaatcaaaatctaaaccacgattgtgtgtgctaaccttagattgatcaagaatcatgttgaggttctttttaccatcagaaaatctttgcaaagaacttttcaaataagaaacctcctgaacaagaatagcacaatttttgaaagcatccaaaagacctttttgttttctacaagttgagcaagaaaacacctcatcttgtttaacaatttcttctatgtgtttaacacgctctaaagcatctttcaacttcaactcattcaaaacgcactttgaacaatcttgagaaatcaaaacaccattgttttgttttgccttatttgtacatgaagcattgaccaaagaacttgcacaaaaagcaactttgtatttttttcaaaacgttctttgtcaaaatcaaatcatcaacaacacgagcatgtaaagcaaatccaagagcaaaagaagattccaactttttagatttttcaatctcaaattccaatttcttgcaattaacataattgacatctcgcaaagcattaatttcagaaaataaaacttcacaagattgacaattatcatcattaggaatcaaagatgttaatctagcaacttcagcattaagaatctcaatagtatgatccttctcatcaagcacaatagaacatgtttgaagtttcttagcaaatttgtaagcagcatattctaactgatcataactaagcttttcttcattatcatcatcagattcatcaacatcagaacttgcattacgagcaataaaagctagatcaacaacatgcttacctttgctctcatctttatcttctggttcatcaaaaacttttatgagttcttggattaaccattgcatacaatgcttcttcttctccttctccttcatgttcttcttcttgttcacgtcatcatctttgactcttccatcatcttccttctttcctcgcccaagcttaggacaatgcgagcgaagatgatcaagtgctccacactcaaaacaatgattcggttctcctcttttcctgttcctaatatttttcatagctcgagaaaatttgttagataacaaaaccaagtcctcctcctcgaactgttcgagttgatcatcggacatggcattaaataaagcaagaacagaagacttcgatgaagaagcaccaacatccaaagaagtcgaggaagaaatcaaagcactagacttagaatcaactttacgagcaagaatattcatctcatgagttttcagttttgtgtaaagcgaatccaaagtcaaagaagacatgttaacagactcctgaatagatgtaactttcatctcccaaatagatatgtcaagatcattaaaaaagtggcgagaaatctcagattgtggataattagcatcataagaagaatcaacagatccaagatcactcaaaattttattaaaccgagaaagatagtcatctaaagcttcgccaggtttcatctaaaatttaatatactcctttttgaaaagatcacgatgaagttctttaatattatttgttccttgatgaaaattactcaaagcagtccaaatctcatgagcagtttgaagatgagcaacatgatcataatccgaacaagaaataccactcaaaagaatattgcgagctttgcaattttgttcaaaagcagttttttcagcagcagtattaatagcttcaggaatcacataaggatgagaaacgtttctccaaatatcataatcttcagccataatataagattgcatcctactacaccaatgagaaaaatccgttccatcgaaaacatgaggcttagttgaaaacctagcgggagtagccatggcaaaaactctagatcgataaaaatccaaagaagcaaacaaggctctgataccacttgtaggattgaatcacaagaactaagccaaccagaggggggatgaatggttggtatacccaaaaaccaaaagcttttagcgaaaataaaagttaccctcgaaattgatggatcatggtctgaccgtagctgtcctgccggtctgaccgcctggttgccgtcagtctgaccgagattatatctccggtccgaccgccgagatcagctgctgctcgctgtcgccgacgccggtctgaccgccgtgctcccgccggtctgaccgccgcttgtcgccggtctgaccgccggtgagtcaccggttagaccgccgaaacccggtgaaacacaaatcgaagaactctcaaagtagatgacaactttattgattctctctgtgtttacaaagtgcaccaacagcactccttacaaaaattttgactaaactccaaaccctaactcaaaactcaactcaattgctctcaaaagcgatacaaaagcgatacagggaagtctcacgctccccctctatttatacatgaggtaggcagcctaaagccacgaaccaaactcatactaagagtcctaaacaccttaggaaaccctctagtacaagacacaaacttaacataaccaatcgtactaaatttggactccttccaaattcgactctgcatcccatacgcacacaatacctccatcgtatgccatatggaatcttcaccaaccacgtgcatcaactctagccttagtatcccacatgatatctgaccaccacggacatcgtcttaccaccaagccgactcccggtccatcaccgcaaatactctcccgagacatcgagtcacctacacatgaaacaaacaaagaaaccatattccgagacccagctatccccaacttgactcatttgtagcaaacaacagtattacatacgtatagtatccatctagaagccataaccatgaaacaatcacggatatccaaagaaacaacccgaaaccgacacagcgtcagccggtcagaccgcgggccggccggtctgaccgctacacatgagcctgtctgaccggcaacaaccgcccggtctgaccggtcccgacaaaacagcaaaccctgttcatcacctaaaaattgattatctccaaaaccacttcgacgataatctctaaatatcaaaaccaataatcacaaatgccaattgttcatcacagaataagaatcgaaacacacattgatcttacacacaccgtgcatgttaatgttctcatagttttagttcaaagtaactaaatgagatacggaatcatataattaaatacgtcatacagttagcatcacgaaggggaagagtatactttttttaagtagtagttgtagtaataataataataataataataataataataataataataataataataataataataataataataataataataataataataataatttgttgtatgttacaaagataacagttatttaaatccgttacaaatttttagaaaatagagtatgctgttcttaataggagccaggataatagtgagttataagtacaagaattctcaagttaactttcaagtaaaatagaactacacaaaagaataagagatcttgtctagtcaaatcaaattcagtgtaatggaacaatagggattatacaaagagatgaaaatggattcatcaatttcagagagaaaccgaaaacagttggatatcttggttctttaaccttcaaagataaagtgaactattactccgtgcatcccagaggcgaattgacttggcagcagctgccgtaacaactgtatcaggatgcttcggatcccagcaaagctgatctacataatatgtgtgatatttcaactcaaaatctttaaccctggactgtgcaatatagaaaccttaatcagaacagttgtgatttggtactcccagagaaatagaaacaaccttaagtttttttcccctcctatgaggctaccaaaaagtcttaacgttctccaaccaatataatttaattagctaagaattcattcacagcaattgtttgcataataaagaacattcagttacaacagataacgtaacttgaagatatgtaaagagacagattttgatgagatatttccaattaattattatatttatctttcaaaactatagaaatgttcatcataaaaactgggagacagttattcatagtgactgtcaataaattatattcatcaaaacaaggaatataagctccttgctcaaaggcaaaatgaagaaaataaatgaaggctagtttacttagaacatacttcctccatttcatattataagactttctagtattgcccacgttcatatacatgttaatgaatctagatatatatatgtgtgctagaaagtcttataacctgaaacggaggtagtagtaaatatcttgcatacccaaaggcgcatgcaagtatgtttacacaaatacaccactaattggacttttaaaatatcacaaaactaaaagaaaattcacaattggtgaatttccatccaggatgcagtgtttttttttttaattcacggtgaagctggacatccttaggattttaattaggtttacatatgtgaggtaacaaaactgaacatttcatcgattgcaaaactcttcatccactttatgagggtgccagatgccaatgatttttgtttcactggaaaggagaaggtaaaacctagttctctttggttaccctcatgaagatggcagtcttcgccttcagaggcaacaaatattgctaaagctgcagcaacaaaatcaagcaattgcagtactttcagtcaaaaaaaaaaaacaaaatcaagcaattcctagagcaaaattacatgaaatctgacagacttagtcacttagtatagaatcctaaaaatgattggaattaacaaacaaattgcaaaaagtgggaaatggtttacatgtgaactgctggacattaaatgttgtggaatgggcccctttagtcttgcttgataactcactgttcctgcctcctaattgtacccgtaaaacacagaaatttgttcctccaaggtcaagtgcaaaaaaaaaaaaatccctttctcaccccttcaataattttctaacactgatcagatttattgtgctgaaaatgcaaaatccatgcaacaattgaaatataagatacccatggatgcacagttcaattattccagtccattttgtgaagttcagtcacaaccagatgtaaactgtactgttagacaagagctgcagccgtataggtcctatgcgaaaactggtaaatacctatgcttgcaattgtattccacccgtatcgaacatacaaatcttcatcgtctcctccgtaattttgacaaattgaccctttcaaaaaaacttatttcaaaaataaatcgtgccaaaaactaatttcaagaataggttgtggcctcagcgccatcgggattggcgctgagctaaaacgtcccagcgccatcgccgttggcgctaagatttttgtcctccatagcacgagcttagcgccaaatgggttggcgctgataccagtgttaaacccgtgcacagtccacattagataagcaagtgcagctagcttggtggtagtatcattaagtttgaacatgaaggtcactcgaaccacgttagtgcagtatttctttttagtttttcttttactccgtgaattattgtcctattaatttcttttccaaagaattataaatataaaattttaaacttgaatcgtataattttggttcttatatttgttccctctaagtctaaaaataaaatgagttgtaaaaggcacgtgaacattgaaaagaacaaataaaaagagcaagttgagagaaacaataattaaaatgaagaggacaggaatagaactcctgtgatttcgattgctactacgcgacaccaccactgggctatctacacttccttgcttttgaagcacccatgcgattttacggtatacagaggtcagcgccgtggagtgtggtgctgagctcatcatacctgacaagtttgtaccagcgctgagacaccaccttagctcagcgccaatcacaatggcgctgagaccacggcctattcttgaaattagttttaggcacggtttattttttaaataagttttttgaaatggtcaatttgtcaaaattacggtcgtctccttctccgttggtcccttgccttggtccgaagaattcagcgccggagccttacctttgtcagagggattcatctccggaaactttaaattcatacgcgggttcggatactggagcttcatttggatcacggaatgaggacgagaaaatcagacgagactaccgatcggtcgcccgatctatgcgtggagaaatcgggcgctgagatcagcatgaatgcatacgtgcaaaaccactttgaactatttttttctcttaaattatttatccaaattatgattcaattgcaccattaaatttgttgcaattaaatctttaaaacaagaccacacatggatatattccgacgaaaaaaaatttagcttattattaaattatttttaaatgttgcacgatattccaccaaatatacctgaattgtttcactaagtatatcaaaaatgtttcatttgtttaaatcagacgttgtttcatcttacataaaaaacaatattttaataaatagcgaaagaatatttcagttcactacaaaatttgatccatacatagtgaaatattttttgtggaacaaacaataaaaagaatccaaaatatgtgggtgatttgttgcaaaagaatatttccatcacttcattagaagatctaatacatagtgaaacattatgagtacactagccaagtgaaacattttatgtggaacaagaggagggacatgtgggtggacccagggaatgcgggcgtggggggagggggtgcgaccgattttctccttcccccggtcgaccaattctaagcatttgcggagaaaatcaaagaaaaattttctacgcctaatgactccaaggcaaacaaaattgcagagaagaaaaaaacaagcaacaaacaggtcagacctcaaggtagacagaggaggaaccgaggaagaaagctagaggatcacatcgtaaatcgtggtcgccgccgcaccctttgttcgagctccacctacttgaggacccagaagcagcagcatgccttcctcgggatagatgaatcggcctatgccgctcagaaccttctcagccaaagaaactggccccgccgccactctcctccgcgtgcttgagcacccgctcgccttctccagctcagaggggaggacggacgccaactccagcatcggtggaaggcgacggcgctggagagaccgcagcgtgggctgggtaagggcaggaaggcaacgacggggtgaagaaaggagaaggagacggtgggggagggaggatggcggtgatgggggagggcagactatggcggcggctaacccgcgccgacgccggagtcggtgggaggcggcagcatcggggcagggaggcgacggtggggggaggtaaggaggcggcgacggggacggctggcctgcaccgaggcgagggtggtcgggcggcggcggcggcgctggcgaaatgggggatcggaggagataggaattttgggtgagggaaggacattttgcagaaaaccccctatatttttcgtgtttacagcgctacctctggaaacggaactttctcttcttcatgttgtatttttctggaagacgaggggttatacgtaagagaataccacagggtgttaggtggtccgaggacgtatgcgatattccatcaaaaacgaggagctttttacaaaaaaaaatcccaacacgcataaacctcttcatgaagccaaaaaagaattccaaaaaacaagaaaaacgctagcttttcggctgttaatggctagttattataagagagaatccactcggtaccactgagtttgtcaccattctacaatctaccactgacattgtaaagttctataatgtaccaccatattttgttcaacctctactatgtgtcatcaccgtctagttaacctctgttaaagctctaaaaagacctatttacccctagccaattctacaggcatggctacctccttgttgtcatcaaggagggccagctccttgctggcggtgggcgactggtggcagcaacgctggggacggcggttgcagcggcgccggggacgacagtgatggggacggaagcgctaggacaccggcagtggaggggcggtgggcggttggacgaggcggcggtgctgcgggcaacgaagccaggatgctagcggtggaggtgtggttggcggagcatggggagagcggcggcgctgcgggcgacagcgccagtacgccgacggtgaaggcgtggtgggcagaggacggggagggcgccggcgctgcgggcgacgggtagggcggccgcgctgtggatgacggggagggtggcggcactgtgggcgatgacgccaggacaccgacggtggaggcatggtgagcggaggacggggagggcggcggcgcggcgggcgacggcgccaggacgccggcggtggaggtgtggtgggcggacgatggggaggacggcggcgcagcaagcgacggcgccaggacatccgcggtagtggcgtggtggcgaacgacggggaggacggcgacgcggcgggcgacagggtcaggatgtctgcggtggaggcctggtgggcggacgaagggaagggcagcggcgctgcgggcgacggcgccaagatgccggcgatggaggcatggtgggcggcggttccaggacgccggcggtggagtcgtggtggccggatgacagggagggcagcgcctggtcgccggcggtgaggatttgggaaatttgggctaggttttagtcaattagtcaaagggcatttcaggcattaagagaaaaatcaacactacaaacggagggcaactaacggttcgctgacggcgatggtacgcagtagagattgaacaaaacacgatggtatattatagaactttacaaagtcaatggcagattgtagaagggtgacaaactcagtggcactgagtggattttctcttattagaagtcacaaatatcaaagtttatataaaagcataacacatctccgacataaaataaatatattatgaaaattatattcaataataggtttaatgaaacaactttggtgttatatacgcttatgggtgtgtttgtatgccactttcccaacccctctccctcattttccgcgcgcacgctttttaaaccgttaaacggtatgtttttttgtaaaaagtttctatacgaaagtttcttaaaaaatcaaataaatctatttttaaaaaaatagcaaatacttaattaatcacatgctaaaggatcaccccattttacgtgcgcacggtttgcacagttctcatccccttgtagcgattgatcaatcttaaaagagatttaacttaagataaacataaagtgatttataatatgaaaaagagataatacctccgtcccaaaatacttgttttacttataaagtttgatcatttgtcttattcaaaaaattatagaattattatttattttgtttgtgacttgctttattatcaaaagtactttaactatgacttatcattttttatatttacactaatttttcaaatatgacttatcattttttatatttacactaatttttcaaataagacaactggtaaaacgttacaagcaaatggtcaaaatgaccactaatttgggaggtagtagtagtttcatttgaaattcaatctctccactgctgaaaattcagacattttgaaccgctccaattctccatgcatatcatgtgcatttgtaaccctccattacgttgatttttattaaccaatctaacatatacacaatacaatattaaaaaaaatattaaaaaaacaccatggtcaactggacatgtcaatgggaaaaaaatcaacactgaaaatatgaattcaattacattcttgtctttttacatagcagcaacactctgcacaagtaatagtagcctttggaaagtcaagacacccttcatcatgtcgtgaccttggatgttaccatttggactgaatcccgccaatattccaaataatcacgtaatctgtgattccttagaacaattgataaacaggctcttgagtgattggacagacatgcccatgcagggtaaaccactctttgatgtagactcgttcaaaagtctgataaaataaaattgatttagattacataactgtatattgctaggaaaaaaacaaatacagttacaattttgctaaaaatctgtagacacattttaattgagaaatcagtcaaatttctaaccaggttgtctgatatgctcataagattagcgcattagctatataggcctagtgggcttacctcgatcataggatgtctccagaaaaaaaaaatcattttttagaacaaggcaagcaagaagtagcattctagttgacttgcatcagtacctctatagtctatactacatgttagcgacttagcgtatatgtaccctcaattatattaaatgcatacttatgaattactcctaagaaatatctaaaatttacattgagcacctaagaaatttacgatgggtatatagaacttacactgtaatatgttaaaattacgagtatctatgaaacttgcagtggaacatttgagacttacaatggtatatataaaacttacactgaaatattcgaattttatagaggcctatcaaaatttacagtggacattgagatttggaatgataggtcttcaggatcctatatagtattaaacttgctggtattaaactgctgcatggattaacacctaatcacactattaatgcatcgcaggccggcccaatgcaaggagtaaaaccaacagaattccaagaggaaatatggcaagaacagtatagatagttccatacagttacctggccggttgcaattatcaccgggtactgcatgatttttcctgacaaaggacagcggagcaattttggaaccattgcagtccatggcaaccctgtacagttgcttgtatgtatttttcccttgtatgtagttttgataccggtcacaaaactcgagctttgtcagcattttctcttgagctctgagaggcctcaacctacgaactatccttatgtcagtccattctcttctctacacaacaagatagattgcattactacaatggaaaattgagatgtggcaagcataatattttttttctcgaatactcatgataacataattgataatatacccttgccactttgcttgttgagataggccgaccaatggtaacttcggcatataaagggtaccaaatctgatcctgcaattgtgtagaaagaacttatgacaaatgcaggaaaaaggataccacaactgtattaaaggagaaaatgtactattatggcttataaatacttacatcatcatcccgccacttaacaacaaattccttaggcttatgagaatacaacctttgtgacaaaaggcttattatttcaatcagctgaaacattgtctgcattggcaattcatttgaggacagctctcgcaaccacttcataaaattctccatgtgctccaccttcattttactcacatcattctgagtaatgaccagaatcaaggaaagtgcagagtaaatgccttgagatgttaccagcccactttcatgttcagccataacaatgttaaccaactgctcaactacagtctgattgcagatcacctccagcacacatggaccttttggcagatagtcaaggagaagcaggacatcatcagtgaccatgttgtttccaatatatccgcagagtgcaagaacagcaatggcagcttcttttcttacagcgtcgttctcaaagttgagcagattacacaacagtgtcactacaccaatatccagcacacttttcctgaacatgtcaaactctgacaggatggaaactatagaagctaccttcaccaaagatgctgctgcactagcaccagactcaattgccacttcaacagtctgtttgaggaaacatggcaattttttctgcgcagctatcctctccctgtttggcctgtgaattgacaaactaaggacaatgctcagcctctcttcctcaagagcccatgtccatatcgatttccattccgtagttagatctatcaacacttgtatcatgtctgggcacttgttgaggaaagattgtgctcccttactggaatcgcagagtatccgaatctggtgcaaagcctctgtacacaacaccgatttccctaagtttcctaggatagcttgaattttttcctctgaaggtaccaacaggctggacagtgttccagtagaggcagatggagaaaggacagactgatcatggtacactgcagcaatcacgtcagcgactaagctagtgcttttttgagaacataaccactgctggtatgattcatccacaaactgcaatgaagcaaatagaaaaaagttaatgataactaaatggcggaacaattccagaagaatcaccagactgaaacacatttacactaacagaacacaataactgcatgtggccattcagaaagtaccgataaatcattttgaacaggatacacggacaaccattcctaacaaaggaaaaaagcactttgatgattgtaaacagtcacacgacagttccataaatgtttctaaaagcaatacagtgaatcaagatgcaatgcacaaatggaaatagacaatactagcaaaaaaattcttcagttcctcgttgcatgcttctacttgtcagaaacatgacatacaactcatgagttacatattacattccaatattatagcacaatatatgaagggcaacatgctggatcatcataaggcaggagtttaacaaaacccacaattatttgcaaaagatagaccagcaaacgtaagtagcagcacaaaagtccctttgaactagttctacataatgtatgacgtgcatgtttaactaattatgaagataaacgttatatatcaaaagaaagacagcagaaatttgaagcattcattctgagtcgcttacctctagcactggccttgatgtgcctgcagattcaggcaacacctgcttgtcacaaaggattcttgcagccaatcttgagggggaggaagagtacttagcgatgccaagaaccttcttggcttcctcgcacatcccttgccagaatcttgattgtggtagcagggcagaggaggatctaccttgattgcctcctgtgtaagccctgtttttctcgctcattgctttctttgtgatgatacgaagtggttctcccatctgatgaggtgcaacagttttacatgaggccattggactaaattttctcccaaataagtgtaataatccaaacatttccggggagcagtgtaataatgcgtatggttgtgattatgttagggccaataaactaggcggtgggtattcctagagaacaaaaacatacagagcataattgatttcctaaagaggcacaagaaagttacagaagtttgattgtgtaaagccaattatatagggcaagtagaacaaatagtgtcttgttcttgaaccaaaatacataatggccctcaaaaaggagtgacttgcccagatagttccagaagataccgccggactgaaacacattttacaataacagaacacaataactgaatgtgatcatttagacagtaccaataaatcatttggaactggaatttacatggataaccagaccaacaatttgatgattatttcttacaaagaaagaaacactatgatgattgtaaccggtcacataaaattttagcataactatttttaaaagcaatacagggaatcaagatgcaatcatgcaatgcacagatggaaatggaaaatactagcaaaatattctttagttcctctgttgcatgcttctactcgtcagaaacaagatgacatacagctcaagagcttgagattacattcgactatacaatactgcagcactataaatgaagggaaacagaaacatacagagcataattgatttcgtaaagagctctccatattgtgcaatgaacatcaagaggcacaagaaagtttcacaagtttgattgtttcaatgagattatataggcaagaaagttgaacagcagctcgttcttgcaccataataatagataaaggctctcagaaatcagcgcaattggcttcccgtaatagttcctcaccgcgaatgaacaggaaaggaagaagagtgaaacaacccaacagagacaaaacctgaccagcaagcagtagcagagttgcaactcaatcagaatgccaagaacgcatagagcactcacctcaggtgctggtggtcttgacgtgcttgcaagttcgtacgatgtctgtctgtcgtggcggatgagtcttggtgcgaatccgagaggggagggggagttcttggcgtattcttcctcgagccctccctgcctgagcactcttgaccgaggaggcggtggaggcgcggaagagctctccccgcggctgcctcccatgccgtcccttgcgttcgcctcgacgacgcgaagcagttctacttcttccacggccgcgcccgtgcaagcgctggcgagttcttgggcggaccgcattcccgtcccgcctctgcctttccctcctcccggcgaaggagcccccgtcccgtgcttgcttgcttctctcgctcgtacataccgcggcagagccgagcgctcccccgtcccgtgcgccgcgcgcgtcgcgctcccggcttgggggctcatggagctcgccgccgccgccgccgccgtccccgcagccatcccggggcgagcgcgcgcgtgggctggctgagcgccacgcgaggggcacgagcacaagggggagcgtttggggggggggggggggggtggaagagaggatcggagaagctggtggtgcaaagctgacgtcatggcggcggcggaggcctttaccggagccggtggcgaaagttggcggcatggaggacgcggcggtggcggcgagctgggccctgcagggagcgatgcgggtagggttttgggtggaggagagggggctcgaattttgaaatcggaagaaggggaagggggaagaggaaaggaagcgagcggggagaagaggcgaccgagccggacacgggagctgcctatcccgttgactgttcgccccgcccctacacaactcgatgattgaattaattattattactagaaaaaatacccgtgcgttgtaacgggtgaaatatattttaatcttattgttatacggtttagttaaggtgagattcaccatgggaatttgcttgaatatatactttttaaaaaatcatgagctgcaattaggatttttgtgcacataacataattaactttaatttttaaattaaaaactggttcattataagattttataatcaacaaaaaaattgttgaagaaagaggtactatagttttgatttttcatcaaccagatgtgcatggtccgtgctagtggtcgagaaaaaaaaatttacgtgcaaatatgatttgacaggagggagagaaagtagacttattccaggagaggctcataaaaaggtagacttattccgagaggcccatagaaacggtgcaagtaatataggtgtaaaaaggagagagaggtgattacatggaagatacatatactatatcaaccacggttttgacccgacaattaaacggatcacccaaaatccttacgtattttttattaggtatagaggtatatattagagttagaattaaataacatgttattattaaaataaaatactaaatatattttttattaaattcttcatgaatgaaccctatctagaattgttttgaatttttcaaagctcaattgctaattttaataatacaaatataattttaataattaatttaaagtaaaaacaaactaaaagccctctcctaagtctgggccaaatctggcccattcttcttctcctccctcttgggctgccatcccttcctcttgggccgtcatccctatctccacttgggcccagcagccacctctcttcctttcctcttcttgggccaccaagaagcagatgggaataaaaccgaaaaagacgacggaaaaaaaggaaaacggccaaaaaaaacgcacggacgaaaaaaaattgtcggaaaccttatgtatttttttaattatataggtatagattatttcaaggaaagatgattgaataaattattatcgatagaggaaaatcatactatgaaatgaaataagtatcataaaactaacaaataacttaaggaaaaaaactactatctaaatcatactggtgcagaatttttctttagagaaatcatctattaaaaacgtggcacgaaaaaaatcatgcatatataagtagttgtttagaacgcctgcacatatgaggtatgtctgaattctggaaacatatttgttgaactactttaagtttaagattaaaatcttgtggatctctaaccaccatctaatgtacaaggtgccttctagaggcacaaattgcctcgttagggtgaggacacttgcacttagagatgtttggttgatgtcctgtgttcgtgctagacatgacatgcttgcccgatacaagcatgtaccttatttggttggtgtcctcgggtgtttccgcgatggcctgacctgatagctagttgcgttgattagtctggctcaggagatgaaattccaacgcctgactcaagaaagtgagaagctagtaagggcattagcagtgcatccttatttcacgtgaccatgtgctctatcttagataaaaaaaaagtgaatgaaaccacacatcataaattttaatctcccatggtgtgctggcctccctctccccccccccccaggttgtgcccttcatctcctaggccgacacgtctcctcaccttcccccaccaccatcggcacagctccactttcctcgaccgccgacatagctctccctcctctccaccacttcccctccccgtcggcacctcacaatctcggacgccacacaagcccagctcgacggcttgcggcggtggccgcctctcacctctccctacgtcgtcccctccccgcctctgacctctccctccgttgtcccctccctggctccggcctctccttccaccgagctctccagatccggcctgtggctcgccgaatctgtactcaggcggcggcaatggggaaggtggcggcggctcgaaggcgatgctaacgtcggctcaatggtaggcctgcggcggcctccccctctagcgtcggcgcgacatccccattgcagatcgaagagacgagctcggcgccgcaaatagaacaacgagcaggggtggtaacgaggttccctctctgacacggtagtagctttctctggcgacgaggttccctctccaacgtggtagcagctttctcctgcgatgaggttccgtctcggcgcggtacaactctctccggcgtcgcatggggccaccaaacgtgaggccacaaccctcacagcggggtcgtgccattcttcccagcgtcgcttggcaacttttctgacgaagaacgcatgcccaatttttactaccaaacctcgttaggtcacgctccaagccgagctggcggagaatatcgggttggccgaacgccacatatttgcactgtgaatggcctaagattaaggtaatgtgaaagctatgggtcccactgttaattactccctccatcccaaaatgtttgacgccgttgacttttttaaaaatgtttgaccgttcgtcttattcaaaacatttaagtaactattaattcttttcctatcatttgatttattgttaaatatatttttatgtatatatatagttttacacatttcacaaaagtttttgaataaaacgaacggtcaaacatgtttaaaaaagtcaacggcgtcaaacatttagggaaggagggagtacattctttttctttctttctttcttttttttgctttttctttcttcccaccgagttaatactatctgttaatattgtctgttaaatgtaattattacagtatgatgttgcattgtttcttttcaggcacatggttcaaaccaaacaactcatctcacaggctgcctggcgaagcaaatgtcttcaaacttaaaggctagcttcaggcacgagttttcatcacgcatgtgtcaagtcaccaaccaaacagcccttaaagccacggctcttaaaccacgttggccaaatctcgatgaagagaggacacgatcaacactgctggattgagctcacggttcggcgaccttcgccttctcgtccagtcgggcgctcctagccaacaatgtcgtcgtcgacatggctaaaatagaaaacttaagctagcgtaaacaaaaatattgtttagtaactgggaagcgtgctcatgatagataatgaggttgtaaaactgaaacgagaaaacaaaggaagtataagcctcatcttttttcttatgcttgtcagtccaaatttaaattttcaattttatttggagctgattttaagatttttcatcgaagtttatttttcaatccttcttttatatcgcttaggtggcattataattaaaatatatatcattaaaaaatattatgggaccatatgtcatcctctttccttcccttcctcctccactcgccggtgtgttctgtataccgctcagtggcggcacgtccattgggctgctgctcaacacaagggatcatcgagctcgtcatcctcaacattgcaaagaacaaatgagtgatccattactttattagttgttcttaatcgcgcgtcatgcgctgcatgtcgtgattaatttaaggctgcttgtgttgtgtagatcatgagtgaccaatctttcacggtgctggtgttctcgtcggcgctgatcacggcgattcactgcgcctcgtcttcacaagccgagctccacgcgtcctcgcctgcgtcctttcctcgctcggcctgctcgacttcatccgtcgtggctcgggcggagcagatcccagagccagcgctactactccgactaccctccccactgccaccgccgcctgacttcctccgacgggatgtggagaggagggacactgggacagtgattgatggaggggaaggaagagaagtcgaccctgcccactgaaaagttctcatcttgtcggcgagctcgaagtgaacatggggagagaaaatggaggccgtcgtcgggcaccgctctccaccgccgccgctccggccaacgtgaacaaaaaaaggccgggggagagaaagagagaagggagagagaggggaggaagaaggaaggagagatgggtccgacatgttagtgggtactataatttttttttcctgaatgacataaatgggtcacacatatatttttttattctaatgccacttaaacgccacatcaacgccacgtagaatgaagacctgattaataccattatgtaggccccacatcagtaaaatcgctctccaaaactaccaaagaagttaaattacatcggttttaatagttgggggtcgagatatccggtaaaaggatacgaataagattcggtcacaagtaagagagtcgaggtgaacttattccttccaattactatcgagcctccaggccagcctcgagcccactgaggcccatctgcctcgctttcccacactaacgccaacccatctcctctccgcccgcatcagggaaaaaagaaaaagaaaaagaaaaagaaaaagcaacgaacaagagggagggaggaagaagaaaacctagggcctgtcactttaataccatttttaaccttaccaagttttattaaagttattaaaaaagtggttacatctagtttgctattaaattttggtaactatataagaaatcctgccaaaattttgacaagttaccaaaattttagaaactataccaaaattttggcaatgctaaaatttgataagattttttttagcattaaaatgaacaggcccctaggcaagagaagggtagagaagaagcagcggctgaggagaggagaggcgagacgaggggggaatcgaggcgcgagggagagggagagggagagggagatgtcgatcctgtgggagaagagcgcggggtggcggtggctggtgcggcggacgcgcgactccaagcccttcttcttcaccttcgcggcgctgtgcggcgttgtcccgggcgtcgtcggctacggcgtgatgcagctcaccagctcccgcaacgaccagctcgaggcccacctccgctccaccgcccgccccgagaccgcggtgcgcgcccgccccccaaatcttgttgttttctgccatcttttgggttgttctgatgattaattaattaatgggttgttgcgatcttctttggttcgtatcgccgccctctctaggttcttgatggaaacttgctgtcgcgtagtggagttctagacgatatcgttcgatcttgtttagatgtgaaattagtttcccacttcaaagatagatcgaatataccgagtgaaatgttccaatttgtggtgcaattttacgatttcgagtagttctgcggagttgcgttcttctatttgtacactactagttcatgcctgttttgtgggatggctcagcatatgctacctatcaaatgaggtgcaggtggaagggagatactggcattcaatagagagttaatgaacacatctactattaatttgttgttgaatgatgttgttttctgcttctagtcagaccatttgatagctcttttctttttatgctgttatatgctacctatcaaataaggtgcaggaggaagggacatactggcattcattcagtagagagtgaatgaacacatgtatcactcattcgttgttgaatgatgtttcattgtttcttctgctcctagtcaggccatttgatagctcatttctatttattctatttctctgttagattagtagtgcttatggcctttgggaacgttgttgtagatgccaactttgctgagctaattgtgctgattatttgagtatatagcattcacctagtcaagtatgtcatgatactacgatttaccatctgtttggacattgtatatgtctattggcttttacattgtttcaaaagaacttaacatgtattttactggacacaccgttgtgaattagttttgggtaacaagatggcatgcttctaagaagcttttccagtaatcaacctataggatgctctttttggcaacatccatctattataattaggacaacttgttgggttctctttgaccaagtgacttgtagatatggtatgatgacccttcttcggtcttgcagcttataagcctgcaaggatggtgtttatgatgaaccaaattgttctttggcatagatctgcgtatcctgtaaatcagcttgttttgtattgcagttgaaatcaggaaaatctctatttgcagttaatgctgattaccagccatatgagttacccaaggtaggaataaggtcaggctaaagtacctgggaaaatgcatgcttctgaattatttaattaaataatataatgaatgataacagttcttagcaataaatgtgcaactggaatggttgtatgctatcctctgggatgatcagttgggttctagacttcgagcccttcaagcacaatctttccctgttaaaacattcaaatttcaatttcaaatgttttgaacgaaaacgttctgaaatttccattgaccaccaattactggaagttcagtgggaccaattatttttcttttggaatcggtagaaatttccctggttgaaatacatgaatggtcaaactgtcactatgattcccttgtcttttgttggttaatgatgatatgttacatgaacggtaagctgtcgcagtgaacatgcatgatctgatacctagaggacatcatgtaagcttcacatgacttttagtaggaaatggatcagatggatttcgagttgtgatgtcagtattcagaaaaatgtgactaatcgggaatatcaaatctatacaaacataatctgatacatgtaaatatgcattcttatcttagtaatacccttataaggtttgcagagaattgcctggtagctatttttatctggcatgtgacagttttgtttctatgctactgtatgtttacttttacttcccaacggaatcgaggtttactttggttaatcgttcccatcctttccgtttttgtcattacaggagccattggttcttcactgttagttttgttgacttgtttatgctactactttgtctaacattgcacatgttgtttttgcaattccattgtatgacaaaacagatgatggggcaagtgaaccgggagagactggcagagtttcttggagagctgcaaaggaaagaggacacaaatgacagatatgttgctgccctcaaaggggagacactgacgaggaagcggtatgaacggattcagcctgtcaacaaggaaggtacaccggagagtccgcctgtcaaggagcaagctacaacggagagtgtcaaggctaaatgattcatggttattgctccgagaaagatattatccactcaaaacactgaacataaatgtgctgtacctttggaaggttgaattcaaagttcgtaagcatcattatgcatctagtttttgtttaactacaagatgggttcacagtacactgatattttagttgcagttgatgtcctgtaaattttggtctgtgtgcccatgatcaatttttagcatgttggactctttttagtatattttgacatcacatcatatattgctgctggctgatcttaccaatcaaatacggaagagaattatgttgcgtgaacgaccatatttgaaaggcaaaattggttccacgccaccgaaagttcttcagttctgttttataccactgaaagttgctggtacactttaataacacacccaaagtttggtaactgaagcaaaccttttttttatttaattgaggtataaatgttaatgaacttgtgtgttgtgtatgtccctacattcatatcagacatcaatttatttcatgcaatgaccaggcaaacttgttgtcagcaaatttctatttcctctatccaaaaaaaatttaatcctagatttaaaactagatatacatcaatcctgaatttaaatctagatatagtatatatctagatttaaatctaggattgggtttttttaatggagggagtaggttctacaagaaaatggcttaaattgtagaagccatccaagggaaaactacttgagttcctttccctcttttgaagtagtatcaattttggggcgggctcttgagcaagtgaggcccgctgacatatgagctcttaaggaattttttttatttttaattttttttaattaaaagttttacaaaaataatttttcattttgaaaattgacagaagtggtcgcctaccgccctctgggagggcgatttttaaaaatcgccatcccagagggcggcgaaagtaacgtggcagacggccgttcgctctcgggcgacggccgtcaacgaaatttgcaggcggcccccttgccgccctccgctagggcgattttgtactgtgcggggggccgcctgcaaatgggcggcggggggcctggaattttgcaggcggcccccttgccgccctgggggagggcgattttatactgtgctttatatttttgtataaatatcaatagttatcaaatctttttatattgaaaactatacaagattaaaatctccaagactggtaaaatacaattttattattttttagggcctatttggaatgttaccgtacaaatattttgttagtgccaaaatataagcaagttttggcactaccaaatttttggtaaggtaaaattgcatttgatcatatttggtttgctgccaaaatgtaaaattgtagtgaagaatgttctacataatctcaaatctagattacgtattaccaatgaataggcttcaatcgaaatcaaacacaagtactattcaaattaccaaaatattggtagggcatgtttttggtagcaatccaaataggcccttagtcttacgcatacaaaaaatcaccaccataattaaacattgtaatgataagatagataagaagtgccatcgatacacggtacaaatttgtcgatcccgacgaatcaagcatgcggtaacctatcggccccttctaggtcggtcagaatgcattgcattctcgtggtccttcaatcgttgatactctacttgtgtttctgactctgttatcttctggccatgatatgatggagtgacattgtcgatccatcgagtaaatccacccatccttggattgccctgtaaaaatagtaatgttattcagtttgggtagtaattttgtgcaaatcatagcggattttgtaaatggttagacatacaacgaaatcgttgtttacattggggcagacaaaatatctccttcgaaatgtttgttcagcaaaggatgtagccacctgccagcgatctctgcacccacactttggacgctcggaccatttaggtaaccctaatggattgttcctccagtctaagcttgcaatttccacccgacgttcgtactccatccaagcatgaatgaactgtatggtcggttcaggttgcgttatcggcccgccacttgaagtaactctgactgtgtcaatccattgtacgaattgacatttccttacattctcctatgtacatccattttgggatagttaagttaatgatagtactgaggagtgatgaaaagaatagttgtaattaccacgaaatcatcgtcgacaatgtttggacacacgaaacacctttgtcctcgagttcggtgccttacggaccttatgacctgacaacggtcaccacaacgacactacggacgctcacgccacgtggggagtcctaggggatttacgtgccattctaaagcctcagcagcaattcgacgttcatgctcatccttccgccttaggtagtccgatcttgtttcactacgtgggtaagcacgggttccgtcgttttgtgggttctccatgtctacccactcgatgaagttgcacattggacgatatgtctgcgtaagatgttacaattgtgtacgaagaagttagtttttttatccatttgaacttcgaatagatgaagcatacctgatcaaagttcgcgcattggaagaatctcctgccccgagtttgtatcatgagggaagacttgagtatgcatccatccccacaatcgcacaaaggacggtcacaccatggtggaaaccaaccagcaaaaggatcgcttcgccagttgagacgctcaaggaatggcgcttccattttcgtgtgttgtgtgctagtgggaaagaagatatgaagaggttgccttcagattgtcaattatatagcgtcgttttcactgcaatatatgtgaactcaatgagatacattattcattagatgtgacaagacgatcacgcgtgggcgtgattcactttatgtcaacaggcagcgccgaaagttgatagtgacaactcgagctgccgcttttcatgtgtgctgttgtggactgtgcgcgctactagatctgacactaccgtgaagcgccgaaagtgtgttgtcgtgagcataagttgttctagcaccatatgaatgaaaagaactatgtagacgagacaaacacaagtagtactgcagtagtaatagcaaaagtagtactgctttacaagtttgtaagccaaaagaaacggtcacataaggactgaagaggtagaacactactgacgaggcttcttacccctgtccctcctaccctgcgccctaatgtgcccctgggagtacgtgagtcggtccgggggtacggcacggccaacccgtcctgcctgtacaggtgtgacctctggctgctcctgagtgtgcgcctctggagctcctccaagctgagaggagcctagtacgtcgtggtggtgtgcaccgtgcaagtcgtcgtcgtagaactggctagtaggaccagtcctaccggcgtgagacgaagaggccccagtaccgaagatcccggctgcaaatcctgctggacaaggaccatcagtttcatacaggtatttaatagtattaataaaaagtaaagtaccgtgtgggcgagggatcgacgctccgtgagaggaagagctggcgaacgcgcccgaagaggtggcgaacgcccctgcggagctcgcggaagcgccggtcgtgcctgcgaacgcgctcgaaggcagacgaggtcctgcgatgaggaaacgtgccgttaaaacatggtgacatattcgtgcaaaagctgaaacaaaaatgaactaatctctgggctgaaacaaaattgaaattacacgatagaagtatttagtccgaacactcatcacatcacaacagcattttatttcctaaatcgatagcattgttacaccatggaatcgcctgctgcgcgacgacgccttggccttgcgcgcctgcttgttgttccttcaccaggtggtcgcctaccatcacttgcctgtccagatggactagcatttgcgccgcttggaacttctgcattcttcgggcatttcttgtaagtatggccgcgcagatcacacttgctgcagcgtaaagtcctcccacctgcttctgactcatccataccatttctgatgcgtctagtttggtgtcgaccctttttcacccttaacttagatggatctggaatgtaaaaaacttgggcactcagcgttgtgtaagatcctgagatcccgaacccgtatatctcctcactccatgtatgaaagattgcttctttcctgaaataatttgagacgtacacattgggagatatgccacaatcaccggcagcagcaagaacgtgtgagaaaggaaggtgatgaagcttcggcttcatacaactgcaggtacatccaccatccgccttcaagacacattcctgcacggcttgcttgcgatagataccacgcctgctcctatcaacacacattatttcataccgatgcacttgtgtgccttgagcaacaactctatgtctccgtgcctttttgattttatcttccatgtactttgtcactacgttgccaaacactatgttgttatcggccatggacggaccaatattcttgtatcgatccctaaagtacgcttgcgtgccgtgaaggatgaattcaacaatagcaaccaatggaagtacccgaactcctcgcattacccagttgtacacctctgccaaattggttgtcattatgccataccgagatccatcggtgtcgaacaatagagaccacttctccttaggctcattctcaatccactgagtgaaatttctgatggacgaccctgacctccttctcattgttggtgggtcatcatgtaatgcaccaagaggtatgggaggctcgtcaccttcaacttgtggtctgcgagattgctcatctgtttgcttcgttgtcaactcatccaacttgtcccacaactcattaaatttcttctcttggttctgtgcacagagcctcttaaagagctccataagatgcttgttcttgaattgcttgtagaaatttgcacccatgtgacgcatgcaccaccgactccgaacatcaggctacttagctggaagtcccttctcatcccaaccgttctgcaagtagtcaatagcccgcaacatacccgcatgacgatcatgtataaggcaaacgttgggcctcatacgcaccactgcaatgtgcactctctctaggaaccagtaccagctttcagtgttctcactctctacaaatgcaaaagccataggtacaacctggttgttcccatcacacccaattgctgtcaatatctgacctcggtatttacctgtcataaaagttccatctatgcatagaacaggtcgacaatgcacaaaagcattgatgcaagcacccaatgagaaaaaggctctttgcagcacactctttgttcgatcatcaaccgatgtaaatgtatgtaggtcatagtaagtattattattcttctgggcaatggtggctaacaaacgaggcaaattatcataagaagcttcaaatgtgccatacctcatctcaataatcttttgtttggctctccaggcctttgcatagcttatggtgtacttgaatttgttctcgatgtgcctaataattgattttggttcaaagccaatgttaccaacaacactgctgtacatctcacttgccacaaaagctgaagtgatgtttcggtgatacttctccaccccttgtaagtagcacttgtgctcggtcacaatgctaactttccaattatcattccatttacccttatatgcatggacacgccacggacaatcttccttcatgcacctcacttcatacacataatttgttgacttgaccaccctaaactctctctgcaaggaaactgcccaatgcttcaccgcctccttcatctcatccttatgagcataccttgcaccgtcaattacctcgttctccttatactcccagggtacatgatcaccctctgatataacaagtccagaaaagtcctcatttgcctaatcagtggccattacatcaccttcctcatcggatgatgcgtcgtcgtccgcttcctcattatccgaatcttccctctccatttcatcaacaattataccgactcactccccctcatccgccatgcccatggcctgctcctcccttggttgattttcctcattttgcatcgatggtccaacaacatcccctgcattgataggaccctctacatcttcggtttgcattgaaacatttatatctttctcttgtaccgacacaaatataacgaggggccatgaccgttcaaaagccatttccacataccgtctccaagcagcagtgctgtccatcggcattagttcccaaaaataaccttctgttgcacgactcactacaactgatactgacattgtgtagacttcttggtctattctaaatcctctcaacaaccaactataaattgactgaaatgttctctccgcaggcctatcgatgcccttagatgtcattacaaaatctgacagatcaacaccatctggaccaaatctaatatttccttcaccgtgaactatctgaaatgtgaccttatttgacattgtgcctgatgaaaacaataactgcgttaacctcgcatttctgtactacgccctaagttacattctctacaatattgttctccaaaattctaaaagtaggttacattctccagatcaaactaaactacatcttacaattaacactactgtctatgtctcaattcatactattatattctatgctctggatctacacatatgtgctgtgtgctacagatatgctaaaatatatggaactaaaactaaaacgcaacatatatactcaaacataacatattagtacaaatgcaaaagatgtatgggagcaaacctgtgatgaagtgagcgaaccagcagggcttcgccgctccccttctgctgccctcccctctctctctttcgttttttttggatttttagtgaatataatgaaatttcagagagggcggactgggctttataggggggaggcaaaaatcgccctcccccagggcagcaagggggccgcctgcaaaattccatgccccctcgccgcccatttgcaggcggccccccgcacagtacaaaatcgccctagcggagggcggcaagggggccgcctgcaaatttcgttgacggccgtcgctcgagagcgaacggccgtctgccacgtcattttcgccgccctctgggatggcgatttttaaaaatcgccctcccagagggcggtaggcgactacttccgtcaattttcaaaatggaaaattatttttgtaaaacttttaataaaaaaaattaaaaataaaaaaaattcagctcttaagtaagtgagatcaccatgtccgttgacaaatgagcccttgagcacggtttataaaactgtacggttgtcgtggttattacatatggtaaccttctcagtttttgaaattacgatatacttctcggtaaccacgtggttttcacagtaaccgccaaactgtaaggtggcggtaacacaccctaaacggtttgttaaactttgctcttgagtaagtggggtcatccgtcatcatgaccactcatgtaagagctctggactaagcgaggttctcatgtcagctgtagtactgcacaggatctcattccatatgcccaagattggtttcaagttctgctcggatttggattctcaactttagtagcgtaaaagtttagaggcataaagtgccgtgacttagatgtttatagtcatcctattcatatcaaatggacgcgattggtttaatacggtaagtagtaaatatgtacaatttacagagtgacaactataagtcattgtagcactagattcattttaatgttcttatttgcgcttgtccttcaaagttcaaagctagaggatttggttcccgcttctctcggtgacaataagaccgtgcataacagttttagtaatattgcttttttcctccgtcaaggaccttattgaggagagagccctaagttgaattatcatatcaatctaaatcaagtgaaattcaactaaaggtcaaaacgtctccatctcttcatattctccaatgaattaaattatagtattcgctatgtattcttattattgactttggtataatatttaaccatttatcttattaaagaaaatataactatcatttgttgtggtttattttatgattagaaaattttaagcaccacttatatttatgcatattcacattaaacttttaataggacgagtttaaatatcttagaaaagtcaattgcgttatcttctttatgtagtatacgatcgaatcaaaatcaagcatacattttattttgccggatcgattctctcaagtctctaagtcaaaccactttagtccagcttcggatagcacatgcttcactgtatcttgaatcttgtcactctctcatcaatctacacccaatttccatctctcaccttccagagctacccaataaattccaatcatgaatgcacactaaaaaaagacaaaaatgatgcgactgacaaaacaaaaagaacaacaaaatatctcgttcgaatgaaataatacctttaagacagagcttaatgtctgctcccctcatcctaaattatagcatttttaaaactagacattgtctcctagatgctattttaactaataatatctacaaaagtaaaatgttttaaataaaaatagttacatattattatactgtagttcgtttaatgataaatatagtaacattaaatttacatgataatttttttattctttttgctattaaatttacatgataatttttttattctttttgctattaatagttaaaatttaaaaaagtttgatatgtcattattttaaaatgaaggtatctacttactgatatatgatatatcgttcaaatgggatgatatctttttcacacagatgtattataccgtcccaacgataccaacgggtatcgtcttgcagcattaattaaaaaaaaattgaagaagcgagaaatcataccaaaccccacccaacctacaacgaccacgacgactcctctcctccctttctctctcttcacccgcagcacgcgcgccgccgtctccggcgatggaagttgccgccggcgcccgcggcggcggggccggcggaggagggggaggccccgcgccgttcctgctcaagacgtacgagatggtggacgacccgtcgacggacgcggtggtgtcgtggagcgacgcctccgacgcgagcttcgtcgtctggaaccacccggagttcgccgcccgcctgctgcccgcctacttcaagcacagcaacttctccagtttcatccgccagctcaacacctacgtgcgtacgctttgctttgtcccccgccctcctcgtaatcgtcgatctctcttcgctgcgcggtgcgctccgggtggatagccgccttggggaattcaggcttcgttgaagcctaggttgcgtgggggggggggggggggcaaatcgatttggggtagttaagctgggcagttgcttgttgggttcgggaattttaccgtcaattgttacatttgggaatttttgggaactccgtgtcgatgggggatagtaattgctgaaatatccctgcgattttggtgaattgctagtacggtgggtagtttagaacgtggatttctgttccttgtagttatatttggttgcaatttaatgaaggaaaaggtgggggtcttggaagtggtgtagatgtggaatgcttgtgaagttcatcttgttttatcgtggggatgaggctgcatgtgtcagcactttacccagactcactgggtttgagttgtgctttggttagtttgagctatatgcgaagagaagacactgtggtatcgagagctagacagattttcactcccttggttactaggatgagagatttgtgtcactattgactttagtttgggctgagactttaattgttttttggtagcaagactgcatcctttaggattataaactgaccagttttgcgtttttgggactttggacatttgggatggatatccacgagggaattgtggttgctaataatggttgggttttagggactttattcgcaatggacatctctggtactcctcaatttgttaccttcatttagtatatgtaattgttcacaatttgaacttttattgttagtagatatctttattggaaaatgattcttcaacaatgttttgtctaactactaagaagttggtattgcaagtaagatcagcttggggtcatcgtgaaaacttagaattgtgaatgttgatgtgacagcaacatctgtttacctgtcatcttctccataaaaatagctgatacgaggactgtatgagccctgttattgattggtgtgcttgttgtttagtattaacaagggagtgtctgtagtaggtcataatatctctccggaaaaagttcaactgggtgacctgttatcctgtttgctgatgcttatttttttcccaccagtgtccaagaacaagattttggctttttcatggtattcttatcataaatttgtttcttcttgtggtccaagaataggtgatttttttttgtgcatgatttcctttatcgtttttgtgagctgatagctatgctgaaactttaaatcttcagataccagtgaacaatattcttaatatagttcactttgtagtgtgagttgataattccttaaggaagtttcctaacttctgcctattgatagactcttaagaagtgaaagatctatttactcctagttccctaaattaatggagaccctttgcaaattgtcaattttgcagggattccgtaaaatagatccagagcgatgggaatttgccaatgagtacttcatcaagggacaaaagcacctgctgaagaatatccacaggcgtaagcctatccacagccacagccatccaccaggtgctctgcccgataatgagcgtgcaatatttgaggatgagatcgaacggctttcacgagagaaatccaacctccaggctgacctctggaaatccaagcagcagcagtcgggaacgatgaaccagattgaagatcttgagcgacgagtgcttggcatggagcagcgacagaccaagatgattgccttcttgcagcaagctagtaagaaccctcagtttgtcaacaagcttgttaagatggcagaagcatcttcgattttcacggatgctttcaataagaagagaaggttacctggtttggattacagtatcgagaacacagaaaccacaagcttttatgatgaccatagcagcacttctaagcaagaaacaggcaatcttttaaatcagcacttctctgataagcttaggttgggactttgtcctgccatgacagagagcaatatcatcacgctaagcacgcaaagctcaaacgaagataacagaagccctcatggtaaacatccagagtgtgacatgatggggagggaatgtctcccgttggtgccgcagatgatggaactctccgataccggcacatctatctgcccctccaagagctcttgctttgcaccacctataagtgatgaaggcctcttaacatgccatctgagtctaactcttgcatcatgctcgatggatgttgacaaaagccaaggcctcaatgcaaatgggaccactatagacaacccaactgaggcagcaacagctaccatggaaaaggatgacaccattgacagaagcttcgatgacaaccaaaagaaatcagctgattctcgtacagcagatgccacaacaccacgagcggatgcacgagtagccagtgaggctcctgcagccccggctgcagtggtgaatgacaagttctgggagcagttcctaacagagcgacctggctgctctgaaactgaagaagcaagctctggcctaagaacagatacttccagggagcaaatggagaacaggcaggcatatgatcactcacggaatgacagagaagacgtggaacaactgaaactctgaatttactatagaattatacaatttacaagaagggatacaggcgtacagtgtaagatgtttagaatcaggaacctgctgttaaacatgacagatcaatgggtgtacaacatcacacaggtgtacatattttttttccctgaatgtttcggagggttaagattaatagttcgattaaccacaccagttgttgtaaaatcgatgtgtctgtctgtctggcatggtttctcatcttgttggtagtgatttatgttatgcagtgtcaagctgccacagcggagaatcaaaattagcatgtacattacccttaaatatccttttcgtaaaaatatttttacgatcatttttttcaaattctcgtgtccttacatgttgatatttttcttccgtcgaacttttagaagcacacaagagtacaaacccaacgaagtgattaaaatctaattttgtatcactgcttgctattctgttctcttttcacattgaaaagggaggggaaaaaacatggtataacaggattagattttattgtgttcgtatggcctcctcagcaagacatatttatcagaaactcttttagttagtaagatgtgttcttatcttatatagatgggccacttcctcatttaccgtgaatacactttctcaattgctaaacgatacatttcgtgaaaaaaaatttgtataaaattttctttaaaagttaaataaatcattttaagtttatgataattagcactcaactaatcatgcacaaataacctatgaactagatcgaatgaagccgtattctggcatgttatctcatgcttctcaattcaatgacaaaaatcataaaataaagggtgaatagctaacattgtccctgaagtttcgcttcgggctcaatttagtacttgaggtttcaaatcgtccaaacaggtcctccaaattaatcatttgggttaatatagtccttggacccacaaaaagtgtcacgtgagcatgctaagtcatcttcgcatgcagcggtatgaatgaaatgatcattctgcccttatataccatatatgcgaggatgacttgctcctacaacgttagtttggacctagcaacgtagggctggcgttgaggtggcactccattttttagataagtttttgccacggtgtaataaattttctaaatgggttaaattattaaaaattcaactttatgaaaggagagaaataatttgattaatgattcaaagactagaaacattattttagtggaacatcgaattgcattataccactggtacgacagaatcgctggcaacaaaatcctctagtttaggaggaataccgtcccaactgatctcagttagctgagaacagttacaaccataagcagccaaaggatgtgccactttgttacaactacggggacagtgatgaaagctaaaagtattaaacgaatttacacaaaactgcattatatagaagacctcctgctgcatccaacctgtggctcgtccagagcatcaatggtcagtttccagttgctctcatcatgccttttccgtgctgctgcttctatacctgctctgagagctaagacttcatagtggaaagcgtccatgagatgtgtgattcttccggctccagattcaatcaatgagccagcatcatccctaataacatatccccatccaccattccccgtttgtggtgtatatgctccatccacattgatctttaacatctccacatcgggattcctccatttctgtgttgatcttgtattttgattcagtgtttcttggtttaattcagcaaacttcgtcgcttgtttcatcacgatcaagcttaggctagaaacgtcccttctgctctcaccttctttgattcgatttcactcatgccaccacgtatacatcagtaggactgcagttaactgggaatcgtattccaattccattatactcttcagtacctcccatgcagatttttgctctgacaatttgagacgagttccttccatattcacttccctccacggcttctttacttaattgcatttgaaaaaaaaaagatgcccccatcctcatcaaaacgttggcatatcacacatgtcaatttccatcccctttctactcaacctcattcgcaatgctaagctattgtgtgcgagcagccataagaagtgcttcatcttatttggacatttgagattccatagtttcttccattctttctgaccaccctcattgctacttgtcgttgaagccagagcagtcctgcaattcctcctttcataattataggctgatttgaccgtgaaaacaccattgactgtactcgatggagataggtacatgcggttatttttaatttatagctgttgcagccaaaaaaagcaattagacacggttaaaaagaaacaaattatttaacttatcctcatacttgtcgcaaacttagtactccctccatcccataataagcgcagttgtgaatttcagtgcccaattttgaccatccgtcttatttgaaatatttttgtgattagtatttttattgttattagatgataaagtatgaatagtactttatgcgtgacttaacctttaaaattttttcataaattttttaaataagacagatggtcaaacgttgagcacggatacttatggttgcacttataatgggacggagggagtacaaagaaaaaagtcacaagcaagtcttataagaaaaggttcaaaccaaaccattgttccatatgccaccagaaaagtattacttatgatcttaaattatccagaaaagtaatacttatggtctcaaattatctcactgcatgttttaaccctaacatatagctatcgtccttttagcttaagcatgtaaattcttaaatacaataggtattaaaggaactatgtctaatatagataaaaagttaatatcttgccttggctacatgatcatagacattgccgaggtacacgttcaagctgtccttccagcaatgtcaccagcttcttagttgagtggatgcacacccgaaagctaagacagccaagggatggaggaggaggagaacgacgaagatgtggagggaacctaggaagaggggaggagagggaggaagatgaccaataagagcttggtgcttcatggataatagatgcacctcagctatcgcaaccatgatatgtcctaggaagagaactaatcaatgggctcctgatgtaccacgacaatgtaaacgataagttaggggggttaagttaaattagtgcaaaaccggaactcatacttgtgtttgaattagtgcagctacttggtgtgggcttgacatgtttgtgcttgcagaaatatcgaaaatttgtggacttgatatgtttgtgcttgtggaatcgtcatggaatttttgacttgagatgtttgtcttgtgacctactaaagaatgcaatgtcacttgagctgagtttcgtaacctcagcaccatgttgttcaatgttgaggtacccaccctaccattgctattaagttaggtgttgagaaaaaagaattctaactttctatcatgcgcactatccaaaaggcatagttcttcctaatataagtttgtaccacatatatttaaattgacaaacaaggtatccatatgtgatgcatatgtaatggaggacaagattttgaaaattgccgctacattacaaacacatgatgtatgcttgacgaaataattgttctaacctcgaactacggtttcgggctcaaaaccgaatgtaactatggtgtatggtgtgtgcagagatagtttcacatgagatgcttcataaaaaaacattagtacatgccttaggggattcaaattaaaacatgcgacatgtacatatccttccttgcagccttcaatctggcttccttcgcactgtgtaccctcacctgcttcctctctcttttggcctcacaatcttccctctccttataatcttagtccttcttccttttttttttgctcttcctccaatcggagtgttgcgtcatagtgccattcaaaatgctccttgaaccaaagctaatgcttgcatagacgcccaacatattcgagtagacctctatacctatccactctgcaaagtcacctagaaacggaggtggtttggataccttcaaatatggcaatgtattagccaccatgaaaaaacatagtgatgaaataacctcattacgtttgaaataacctccattggcttcttggacgtccctttcttccgttgtggcttagcttctctagggagtatgcgtcatttgcgcacacccaaaacttttggcacagtaagtttgatcattttcgctcatcataaatttgcacgtgttactgcaccaacacatggaccatggaatgtttgtcgataggtgttgacaagtggtaaaatccaatgagtccagtacaaccaacaaacttcaaaaaaaattcaaatacatataataatttacatttttgactaattccaaaggttaaatatcatctaaagttatgaaaagcaacctacacttcaacaaaattggtcaatagttatttttcttcctagtataattttcctctcaaccttaccaaacaaatccaatgcattataatcataaataacagaagaatatcaacattcgaactccccactaacatacctagtatcacaattcaccaaatcacaaagtataaatctatcactatcttttccaacattcaaactttagcgtcaatgggcatgctagtgatatgtgtgtaaagggaaggggtttgtcggggtcagcatcatataggttggcgctgacctcctgccatgtcaattcagacatagcaacatgatggcatagaggtaagcaccaacacggcaatgccattagggctagcattgaggtcacgatccgtttttttcaataagtttttgtcgtagtctattcctgtaatatgtttttcaaatggggtcaaattgttaatgattcggctttatggaagaagaaagataacttggattaatgattcaaagactagaaacaattaaggtcatgtagttttatgagacaatacataaatagcattaaccgtactcgatagagacatgtacagctagttttaaaaatttatagcagttgcagccaaaagaagcagtttgaaatgtttgaaaagaaacaaactatttaacttatcctcgtactcattgcagacttaatacaaacaaacaaaaaatcagaagcaaatattacaaggaaaaggttcaagaatcagatgcacagaaccttttttggggtatgcggttcaaaaggtttaatcatggaaattcagagcctaccgtactaaaccattattccatatgccaccaggatggtgttacttatagtcacaaattatctcatcgcatgttttaacccaaacatatagctatcgtcatttcagcttcagtatgtgcatgctcgaaagttagcagcttgccttggctatgggattgtagacattgccgaggtacatgttcaagccgcccctttggcaaagtcacgatattcttagcatggatgtacacatgaaatatatgatgcccgaaagagggaggaggataggggtggcaatttccccgttgggggcgggtacccgacgtggacccgtccctatggggctgaggtggggtggaattcttacccgcgggtgagcagaggcggggccccgcaaattttcggggacggggttggggatcataatctacccgcgggtggcccagatgggccttggggaatgagttactcctgtgaaaatagcccgtttaaaaaatataggccaaattaaacccatatataaaagctaaccctaatcctcatccaccttctccctcaccccaccccgcaactaccctactaccaccgccccctacccccatccccaacctctcatccacatgtacccttgccgaccgccacctcgccgtctgcctcattcccgtggcccttgtcatccatcgagcccctcatcatccgctgcctcactgcgcaccctcaccatctgcctcatccctgtgcaccttgacgccggccacctcgtcgctgagccccctcgtcgtccgacgcatcatcgccgcacccctcgccatccaccttgtcgccgagcccccttgctattcgccacatcgttgttgcacccccttgacatccacctcttcgctgagccccctcgtcgttgccatgtcacctcgtcgcctaaacctcatcgtcagccttcttggttgggttgcggggccccgaagggatcggggtcagggactggttttgccctgttcatccctccatggccagggcctggggcattccaactcaacctgcccccgccctgcccagttgccacccgtagaggaggaggacagtgacgaggatattgatggaatccaagaagaggggaggaagatgaccaagaagatctcggtccttcttggataatggatgcacctcaaccatcacaaccatgatatttactaggaagataagtagccaatggactccttgatttttagtgacttatggtgaagaaattgtttgaaaaagagtatgataaaatcaaatttgtgggcaaaaccgataatagtttagaaaaaggaaaaaaggaaaaagtatcgggccttaagttgcactgtgcaaccggcccattaaggtccaatagaggagaaaatatctcttgggtccaaatttttatattttacatgcaaatgttaggtttgcaattatcctatataatcttctaatcatccctaatttctacacacatttaagtgttttttcaatttttttagtaatgttctattcagctacacaactcatggttgctgcacaaatatcgcagttatcgcgtcaaaccatgcggtaaccgcgaccaaaccgcaaaatcgcaaaattttgaattcaaatgtttgctgacaaaattcacacggttttcggcggttaacgtgcggttaccgcggggctacataaccctcctcgaatcggtaaaggaaaccctgcttgagatgtttgtcttgtgacctacttaagaatgacaaagtgactagagctgagtttcccaacctcagcgccatgatgtttggtgctaagccccccaccctaccaccgcagttatgttagttctgagacaacagattgcaacatccaatcatgcgcactagccaaaagatgtaattcttcctgatataagtttctaccatgtatatttaaaatttaaagagaagatatgtcatatgtgatgcatatatagtcgaacacatatgattttgacaattaccgctacattgcaaacacatgatgtacgtttgacaaaataatttttccatcttcgaactaagtttaggggtcaaaacctaaagtaattatggtgtgtgcacggatagtttcacatgagtagtttcatgaaaacgttagtagccttaggggatccaaattaaaggcaaaattgccacaggacatacaaataattggctagaagacactataaaatcgtgccactactgagggacactaaaaaatcgtataattggctataggacaccccggacattattttataattttagggagaaaagaggagaaattttaaaaacacaagattgccccaaaacttgagtatggaaaattctgatcttttcctatgtttaacaaatgaaggtaggtataaaattgtaccatgcccctttccctggaacggttacagtttattttggcggcaggattaaaatcatgatttttcaggaactaaattgatcagtggtggattaaaagctggttgtctgccaagtacactcagaaatataaataactataggatgccctgcgcgttgctgcaggacttagttaacatcaattttttagataagaggtacaatctcaagaagaaatagaataaaacaaatagctttcttggagaaattctttttagcagccctatcaaaaatttgtagataatttaggtagcacatgtcaactgaaggagcgttcagccataaagctcttttatagccagattgatggactggatacaagtagatgtgtgtagagatgggctcatgtgttcatgtgggctacatttggcactgaggaggccaagagactcactcgttcagggtgactgatgggttggcctctatgctgcattccatccaatgtctgagaagcaatctaatacattcatccaacggttcacaatttgatgatgacgtggaagcacgaggtttgagcttttggccataactttatagaaagaagggatgtgtgtgtggggggggcatggtttactgttatccagttcccgtttgcttcacaagcgaaagaagccacaaatggtgtgattcatcacagcctagtagtagccttttcccacacgctttagcaacacggatgacatgaaatgcacggcgaaggtgacatcgggttcatgtttgttcaatcaaaccttaatattcccataatgaaaaatatataaagaactttaatccaaccattgcatcgaggtgtctcaaggcatcccaacccgaaattgagaaaataataactacactagaggaaaaataaacggatatagagaacacaccttcggagttgctcctgctcgacctaagtcctaatttggtttgcgaaaaccaaatgagagataggtaggcacgagtatgagaaagatttaaggttcctgattttagttctgacaaaactagtgctaagataggagaaggggttcaacattgtacaagttggtaatgaccttctgccatgctgactcgaacatagtgccatggcggttagcgccaacggaagtgctgggatgttgaaccgctaaggtcgtagtccgtttttgcaataagcttgtggcacatattctatcttgtaataagctctcagatgggtcaatttttccgccttatgagaaaagataataatttagatgataaattaagggcaacctcaatgtttatggtgtagtgtaaccttaaagtgggacctatgaatagtgaaccattgttaaagcaatttccacaatactatggttaaaatttagccgcaacataggcccacataaaataaaaagaaaaagtttcggctcttgctcgcgaggtgaatgagagaaaaagtactttcattttgcttgtgatagaccttaattataaggtgcatcctaagctagtgttacttttcacaatgtatatggttcactttacaggtgcaattattattttgatgttactccctccgtcccagaatataacaacttttagccttttagatttgtcccaaatatagcaaccttgtacttgcaaaatgtaccttttagccctagagtacccataatacccctgaatcaataattccacccaaccaggctggacccagacgccaccaatccacccaaccagtccgtacccacacgccactgtcccgaggagacgcacatcacatcgctcggcctcccacccatcgcccacgcacgcatctctccccccatcgcccatcgccaactcctgatccaatccctcctctcggcacccatcgcccccatccccaatccccgaccatcctctcactagatcccaatccctcctctgtcgcccctatccccaatccctcctctagctgcggttcttcgattcggcagtcggagatggcacgacggtcgaagatggcgaggtggcggtcggagatggcgcggcggcggttggagatggctacagcgtgcatggccagaaggcgcacactcaagcggagggtggcggaagcggcggcgaaagccgcagcgtaagtggagtctacagaggaccacgttcagcgacaagtagaatactggaggcgtgggttttgggtgtctctcaaaggcaagaacaaggtatccatctttgtaaaagagatcgattttgtccaagatttagagaagggtggtgctaacaggttcctctttgtgtcggaggatgaaagtagtgtggactcaccacatccatgtggtggaaggtgacgaggaggcgggtggcatggtggtggtgtggttggcgccgacggcatctacttcaccaccgagttggagcaacaagatggtagtgacgtctccgatgtggagcaacatcccgacggcggcgcccctcccgactccgagttacaagtgggtggtggagggcaccgtgtggagcggtgctcggcactaaggacatctacttcgtccccaagtcagagctgcaaggtggtagcgatgtccctgacttcgaagagcaagtgggtgctggggtgcctaacggagagcagcagctgaacaacggcctcttcaccgacttggacgatcaacagatggatgacgttgaagagccgattgatgtagaggagatggccatcctaggagatgatgatgacacagtggctggcgacgagggcatcgacgaatttgctgaaattcgtgaaggtatgttgaggcttttactcccagcctacttcaccatacgtcactaaggatatgcattgtcggagtagtagtactaccagtacaagtattagtagcagtagtattagtattgagtaggagtagtatttgtagcaatgttaggtgactaattaggagatcatggctaaaaatatggaatgctcttttggctgaactactatgatgtggatggatggtctgaacatgtaacaaatgaaaatggagtagcatatgtgcccttctctctctgtaagcatgggatgattgatcaatttgtttaattaattaagacctttcatgcttaatgtttcctgtttgatggatttgttgcatgctttgaattcaacagagctatctcatttcattactctgctttgtctcaccttaaccttagaggagtactactgaaaaagaaccattcatcaattgagcatagtcttatcagttcttgaagttgaaccacggatctagtctctactattataaaaattagagatgtttttgccggcactttggtatatcatccgtgtatgagtcggtttttaaatttgttcgcttttagaaatacaagtcgatattggagttggtttttaaattcgttcgcttttgcaaatagaaatctctttcaaaaactcgcatgttaatttgagacgatcgaactcccaattacagatcacgattttctaacaaaatatatatcgaagcgaatttaacacagtgaatttcaccttaactaaaccatataataataataataataataataataataataataataataataataataataataataataataataataataataataataataataataataataataataataataataataataataataataataataataataataataaaatagctttacccgttgcaacgcacgggcatttttctagtaataatcaaatttgcaatgtcgtcaagatagcctctaaaattgattttggcatacaaaaattttatgttaaataatttcacattcagttggcttctccacctaagtcttggatgaacataaacctacttaacacataagttaactaaaccgctactaattgcttatacatgtgagcacacaactgcatatcatcattcaaacttcatatttagatcatgaccattaaatacatatgcacacacacattagatttcttccaaaacatgacaacatttgataatgcttccaaataaaacatgcccaaaatatgattccatggttgcatcccaccatcatatattgtacgatccatcaccgagctaaggtttgcatcgcgctttcatatattatgggatcaaaactaagtctagttggaagaacaccatgaagctccattccttctttgttcctgtggggaatcatatacccattgcctcctctagtgttcataacctatcatgcatgactgtagtgtaaggaacacacgattagctttagctacagcataatcaaaatactcctgttcaacattagatattagttcatcgatgtttgcagcattccttcgtattgtcaattattgcatagaagcaaaaaaaaacctaggtcaagaacattcatgtctggagagttaggaggttgttgcatgatgcgaatatcaagtcctgtttgttccacagcattgacaaatgctgcatcatcttgtgttatatgtgtcctggcattatcttgttgaatccaaatagtcccccctccttcaggccatgctgctgcaatagttggaataactcttgtaaccaagtattctctgattgtttctctatcaacaatgattggttttttcaccattgtgcccctaggcctgttgcgactattcctcattgccagttcgtagtattttaagacaaatataaaaatgttactactagtagaagcaaaataaaaatgcaacattaaagcaataaagttatgacaatcaaaaagtgtaggccaaccttcttaacaaaaggccacatgtccaatcaaatgtgcaatttccttcattatcatatcttggcctagcaactgcagccaagaacataaccttgtcgattgcatttttattatgtactgtcctcaatggctttggttcatcagggcgtaggtagaacctcctgaccttgactgtggtattgaaccatttttcatccaagtgcactatgtttttcatgtcactaaaggttggatgattgggtaaagtatcattatctagcatagaaacacagaatcggacgtgaccttccttattttcatccttcaataagggctttattgtgttagactcttgacaaagcttgccatctttgaaactcctatgcatagtgcttttactaacatgcaactcagatgcaatatctctaatagtagtgcgtctgttcaaaggaattgttgggaccagagataagtccacttcgactcgatggcgtccacatttctcctttttagatgtaagatcaagaggaacaccttctgcatggcaatgttttgctttcctccaaatactctgaactaaactcttcttaatgttaaacaagcttgcaacaatggtggttgtgtcccttttaagttttaggttctcactgtctgcaaaacatgcatcaagaacatgttgccgatcctcatctatcaaccaagttcttgtactagtggtcacactttcatgttctacatgactgacatcatgatctatgttgtcttgtccccctcctgaaattgtgaggcaagaatctgttttcaaatgtgatatatacttgcaaaatgtaatttaaatgggctgcgattacctgaatcctctagttctactccataaccaatatccacatgattggcataaacggcaaagtcgtcatctattcattggaacaaaaaataactttcagcttcaaactttgtaaattatgcatactgattatatggaggaaatagatgtgtttatcataaattgtgaacattgtacacacattaagttgtaaaaatgatttgatacctggttgatactcataatcctcctcttcaacctgcatgttaacatcagaatgacgagtagcgtcaccatgatattcttggtcttgtggcgcttgttcttgctcttgttggacttcaccataagattcaaattctacaaatatcaaaatgtgtcaataagttttaccttgtcaataagtttcacactatgataatgctttaattatttatggacataactacatccatctcgttgttattatgattaggcctattgtaaccatacctggttgatcttgataatcctcctcttcgacttgcatgttcagatcgaaatcatgcatgttcagatcgaaatcatgggcaatagtgacatgatattcctgtatttgttcttggtcgtgttcttcaccttcttcagcttggtgggattgttcttcatcttgccatgagtacattacaagtatagtgtaaatgaggatgttagatttgttacatgccattcatatgattctagattatgtcaaatgcatttttagattccaagcacggtactacgaaaatgaccatatactactactacttgctgggttttggcaataaggtaggagaagtccgtaaacttgtacactaaaatctgatttcccccctatattatttttgagtttttaacattgctgccattatcatgtcttgtcctaagtcctgacagcaagaaagaagccttgtgcatatgatgaaaagcgtcaacaaagccactcctctcccgatcagaggtatgcatatactactaagttcaacttatgcatggaaagcaagctactcatgatccctcctgatactaaaatccttagcatgtataatcttcttgtctttcatatcactggtcatgaaatgtgctcatcacaatcaatatcatcatataatccctttgttatgcaaaaacttaatcatgttctttataacacatacctggttgttttccatacttctcttcttcagcttgcaggttgagatcaagttggagggcagcattaccatattcttcgtcttgcacatcatcttgtcggagaccatgttcttcaccgcactcttcatcttcttgtagtgctaggttcagatctatgttcattgtggcctcgtgtatttgttgggttgtggatggatggtgttgagttctctcttgatggatgttgtggatggaggagagtgttttgatgcttaagtgtgctagcgctagtgatttttgagcttggttttgatttatgtaagcaggcaagccatgtgatttggcacgccttcagctgtaatatttggcgcttagcggttcaaattttgttttgtctatcgcttgtgattattgagtagatttttaatgtgttcacactttagcctctatattcagtttgtgctgccactttatttgtacacgccagtgactgacgcaactggtttctgccagagcatatcatggagggtagtatggtctatttattggcttccttaatagctgtgcccaaggctaaagctcgttgtattctgggacggagggagcatttcttttcaaatattatggttgctctaattatttaaagattagaaaacagttaagatgatgtgatttcatgaggcaagagaaaaagaaatatcattaaccgtactcgatatagagacaagtacggacagtttttttaaaatttatagctgttgcagccagaagaagaagaaatagtcagaaacgtaaaatttattactagtactggtatacctaccttatcctcgtcgagtgcggtggactcgatacaaagaaaaaaaaatcccattctgtactgtaccctacgccgcggctatagctccccccaactaactccccttaaacccctgtcagacgcagccggatggataggtagcctcttctccctcctcacgccggagttttccccgcacgcacccacaccaaaccaaactctactcgatctccacggccgtacacgatttcccctccctggagccagcgcgatgggggcggaggcggaggaatcgctagatcatcctggtaagctcacgagttacttcttcgtcgtgttttcttttttccttttgagggggcaaatctgttggttgttatggtgtttgcaagaattgatgtttgtttttgcttgatctgtgatatctgttccacggagtggcggtggggaatctgggtgctgttaattttcctccggatttttccgttttgtgaccgtttcgttttgttttgatttttttttcggagcaggatctctgtcggggatgtcgccggcgacccccgacgttgcctggaagccggcggagcggcggcggcggcggtcggaggccgacgcggaggggtcttcttgctgctccctttccgctgctacggcggcgtgggttggcgccggtaatgtggagagtgacgacccgtctgttcgttcggtcgccgccggggagcaatcccgctccgtgtctcggccggaggaggaggaggaggaatgcgcgtcatgtacccaggattccaccgtctctccgccggtgagcgaatgcggcgacaggactgcgcagcaggaacccagcacccaggagtacaccgtctcgccaccgccggtgagtgagtgtggcgacaaagttgtgcagcaggaatccagcaatcaggagtccaccgtctcgccaccaccggtgagcgaatgcggtgataagattgcgcagcagggatccagcactcgggagtccaccgtcttgctgccggtgagtgagtgctgcaacaaggttgcccagcaggaatccagcacccaggagtccaccgtctcgctgccggtgatcgaatgcggcgacaaggtcgcgcagcaggaatccagcacccaggagtcgaccgtgtcactgccgtcgagcgagtgtggagacaaggttgcgcagcaggaatccagcacccaggagtccaccgtgtcgctgccgttgagcgagtgcggagacaaggttgcgcagcaggaatccagcacccaggagtccactgtctcgccgccggtcagtgaatgtggcgacaagattgcacggcaggaaggtgctgccagtgcgatccctacgccggagaaagtggaggctacccctaggagacccaggaagaggtcaacgaaggggttgactcgattcaagattatgaaagatcacaaggcggcccagagaacggcaacacccgttgaagttaagatcaagaggaaagctaaggataatggtaggcggccacttggtgataaatcagtgaggaggaagttgaattttgaaggcgatgcggtggactttgaaggcaatagggagttcagcagagccaagctgatggaggatttgaggtgccttgccaaggttcatggtctgcgcgatgatctgggtgcaggcaagcgaagcaagaaagggaagaaaagaaaaaagatgactggagaacatcaggacaatggcgaatcggcccttgtgccttaccagaaggccccagctgccacatcatcatctgcgctggttccaattcagaattctacgcaacttgctattgtacaccacagaaatcacttgaagaacttgcggacaaaggttttaggccttgatgagaagacattacaagtgtataatgttctgaggaagtgggatgagactgatagtgagagtttcgaaggtgtagacattggcagcgggcctgaatggaatgaaactcggcgtcacttcgaacattacgtggatgtgtttattgctactgtgcatggtttattgggtaatagtccggattctagaaacttctttttctccttttttcttctcttcacatgtgtgcagcacatgatagaacataagaagtatagagacataacaagcaaaatgcactactagtttgatttctctaagtaggctgggagatatttgtagtttggtttgtctaagtaagccaggagatatttcagtatgcacatcacacaaaagcactgaactttttatgttgaaaatctctactgacatgttagtgttttgtttggaataaaagtaagcgcaagcttgaagatttgtgaactcttacaaaaactaagcaatcctggtggctcaaatgatatcttagtaagaaatgaacttattgatgatttattagtctacagttctaaacaagagaacaatcaataactgcgccaagttgtacactccagattttgaaatgcttaatttaaatgtgaccagctgttttattttccatctcttagtttctaaattggggtgaaattacttaaaatcaatcaggtgcatttttctgagcaaacttggaagcacatgtatgaacatcacttgggtaggtcggtgagaaaaaaaaaccaatcagcatgatgtataatttgatcaaatcatttacttcagtttttgtctgaaaaaccaaggaaatgaaatcagcagcatttttcatcgttggtacaataattattcctggttaatgatttcaaagcaatagagcctcacgtccactttatacaacatatgcgtatgggatgaaacgagtcttggaatcctctgcttcattgaaacatgcagatttaaattggattctaaatccaaactacttttctgtcaggtcccagaagattttctgaatggggaggatcagtaactgattctgttgtgggtactttccttacgcaaaatgtcgctgacaatttatcaaggtaaaacttagacgcaatctgatgtctactttacatgtttgtgctggagcgaatctatcagctgcatttcatgtttctgattataattttcaataaacatgcagcaatgcttttttgaacctggtggcaaaatttcctccaactaagagacatattaatgctgaagcatgttcaaatttgtctctgttgatagatgacatgagacggaaattgaatttgaatgaacaatctaatggtactgattctggtagttcagattttacaaaacctgtcgattttgagaaagagaatggttacaatgaggaggtaaaaggtaattatggccgagactacagtacaattatagagaattttatatctattattgagaaacatcataaagacatgtctacgtgggacaatgcacgccttgagaacatggtgaaggataagtctggaactccagtatgttcccatagaaccttgagaaagtttatggacacatttgaggagaaagacacttctcattgggataagttacgggaggaagcatatagtaagggatacaaaataaagggaaccggaataagtgattctgctgattgggaagctgtgctacatgcaccagcagttgagattgcaaattccattgcagtcaggggacaacattatgttatagcattgcggatacaggtataaggttgcaagatacacgtctatttgcttgtttaaaaaactctgttctaacattagtgtagcaggaagatattcctgaataccttcgttctggcgatgaacatattcaccttttgcaaaattgaacttaatcaccattttgtatcatttttggccagcatatcggattaaatatatctgtagtttcaaagtggtttatgtattcaatattacttcattactagtttagcatccttttttactaggacattattcttaaccaaattcatttccttaagtaggcatttcaatcacttactgtctgttttcatgtgtgtctattgaaataagctttgcttacagcatgtctacataaataggtcttataaatctgaacttaaagatggaccgttttattactttgtttcatacattatagattatacattgtctcatactaatgacataacggactaatactttgcatttaaactacatttttcaaataccctggatatatggtacatttctattctcgcaatatgtgtggccagtggcattttagaacatttattgtttaaattttaaaatgcccattgaaagaacaattttactactgatgcaattaatagattcatgatcaaaagtgcagtttacagaccatgttgatatttgaaataccttttattttcttatccacataattgtatctattaaaaatatatgtgatccaataagaaaatgattgaaacatcagctatgatctaagctcgacctccttattcctgaaaaaaaaactccacactttatgcaagaaaccaagatttacctataatattttgattttaacatcattgtcagtggaaagatcatttttttccatgtaagctatggttttgatattactggaactctcacatatttcttgtcttcttcttcttgtgcatttgacacacagcactaaaagtattccttttccttttacaggcttttctcaagcgtgtaaagaaagatcatggaaattttgacctggattggcttagatatgtaccacgtgaaagtgcaaagtatggacatatttcataaaaacctacactatttttagtatgttcttttttttacgctatgtacaacgtgaaaatgcgaagtatgccttttttttaaaatgttgaactgacagtaaatagctgacaatggtaattctattccgtatataagtttagaactatttcccatatttgttacgttgaacttcagaagtattattgaaggaaaaccagggaacttgttgtagggagcttctatcaagctagctgaaaataacaattcgtagttgttgactgggttacttgccttatattttgcttcttcttttttggcgggcattagaaattacctcatcagtattctggggcttggagataaaagtgttgactgcatccgtcttttgtcattaaagcataaaggtttcccggtaagttatatttttctaaaaagaaaaatcaaatattgtcaacagagtacgtttcattgatcaatctcttgacaggactgcatgctcctttcaggttgatgtcaatgtagctcgcatagtcacaaggctaggatgggtcaaacttcaacccttacccttttctgcagagttccatttagttggcttgtaagattggcctcacccaaatttataaataatgattacaattctctgcttatacatacatatatatttatatatttcccttttggtgaaggtatccaatcatgcgtgatgtgcagaaatatttatggcctcggttgtgtaccatttctaaggaaaaattgtaagtcatttggtcctctaagaaaagtttgtcatacctttggttttcggcatcccatctgatgaacctgatacgataggtatgaactacactgcctcatgataacttttggaaaggtatgcatatatatcgcagtgatcagcatgattctgcatcattttaggcacataaatgtttacattgtcaatattgattgtgtattgtttccattacataggcaatctgcacaaaagtaagtccaaattgcagggcttgccctttcagtgcgaaatgcaaatactacaacagttcacttgccaggtatttttcatagattgtgaagttattgcttaaattgattatcagaatgatctaaaatattgctatggtctgtaacatcctttgttagagcttaagtagtatcctttgcatgatcaaattaatcggtactgtagcatatgttgtaaactctgttaagagcatgttaatgagttgtccctgtgtactctagtctatgtgtatcttcaattgttatttcttttatacggaactatgagcattccataaaatctgcaacacaactaaattgcagaccacccttaggctaaaccaatcacataatgcaactagtgaggttagaagtccccctgaatgttgttatatttgctgcagtgtaataacaagagtagtcttagttatcatagtatatttattatgtctattttagggcataatatgttgcgatttgtagatctttttttatttggtctcatttaaattagagtactgtatcatgacactgggttgttaccagattatcactccctcctgcagaggggcatgggcatgaatatggtgaagagcaagcaagcactgctactcctggaagactcttgttgtcaaatgatagccacatagcaggttttcaacaagtatgtcaaccgcaaatcaaaataaacatgcctgctggaagagaatccatctataagtgtgagcccattattgagatacctccaagtccagaacatgaatatgaagaatcaccttatgagcaagaattatatgaagatgatctttgtgatattgaagataccataccagaattacagtatgattttgaaatagatctgtgttcactaaagcacacggtgaataatggctcttggacaccaaactctggaaaagacttggccttgattaattcacagcatgcctctgttcaaaacaaaaggttgaaaaacatagggcgtcttagaacagaacacaacgcgtatgtaaccctgttttttttatatactgctatattatcctgaaaaatcaaacggtatcttgctaagcttgataagttgttgtcacaggtacgtcctcccagatgatcatgcaatcttggaagaggtatgttgtatgccatgagcctgtaagttcaatttttactacaatgatgaaatatatttagtgaccggtttgcaatgtctaccagtttgaagatagagttccagaagatccatgtccttatcttctagttgttatttcttgttctgatgaacacacagtgaaaggcacaattctggtgagcaaccacttgtttggaacataactgtaaggtgcagtgtaaaagataatattgtgctctcgattctcaagtaacatgggctcattattaaacagagtcaaaactcagattcagaattttggggatatgcatatctatataaaacaatgttgatatttgtaccaaaagttaccgaaattgaagttaatatcaaaattaacaaaattttcatttgaacttatgagaccatatcacattgttgaacttacagaaattcaattgtagatatttcttacaaggtagaatgagaggtttttcaactgtaaattctgtcataaacatcttatgcaaattcaaaatcataagaaacaagtgatagtttcttatcttctgtgttctcagtttggaggaaattagtacgagttgatccacaaccctcactattctaaggacaatattttttgtttctatatgtaaccttaaattagttttcacttaataaagattataatatgagtaatttttttctcctttttgattagtttttgcactcactattgaacagataccctgtcggacagcaaccagaggaaactttccattgaatggtacctactttcaggatcatgaggtttgcagcatttggtcctcttcactccaatttcatcttatgtacatttactagttataaataagatgaagaccatattggctagacattgatctgttatatatattatcctttacaggtttttgcagatcattcatctagccgttccccgattaccatccctagagaatgcatctggaacctagatagatgcattgtatattttggctcgtcgatacaatcgatcatgaaaggtattgtttgctgaaaggcgaacctgagattcatgaaataattgctttgactgatactaagttgaagtaatcatcaattccaggtcaaacaaggcaagacattgaggactgctacaagaaaggtaccaagtggttgtaagatttatttcctctttgatgtttctgtcttcgacagtccgacagaatttagatactgaataagctaggtatcttacaattaaaaataaacatagctagaacataagggcctgtttggataggggtgactggcattaagtagattaagatatagtttgaagttgagccatatcccacaaatttcgaaagctatcttacagctcaaacagctgaaggccagggataaatcagtgaacctcagaaaattcctactgaaagtgcatccgcttatgcgtagcataatgataccctgttaggtattgttgggtttgaaggggattgaagaggattggggggattgagagggaataattccacaccacaataggtgtggaataaatcccctccaatccctctcatggggattaaccgaacaggccttaggtggagtcaacccacaactccaccactacactacaaatataccactacactacaaatatgattccctctatgaaattgtatatgattcattttcttgtatcacttatacacaattatgttgcaattttttcttttgcaggatatatttgtgttagaggatttgatcggaatacaagatacccaaagccaatatgtgcaaaattacacgccaccaatgaaaggaacggaacaggtgaaaatagccggaagaagaaaaagacatcacaagaggggaagaagattgatgacaaatcttcctttggcaaattagaaattaactgatatatatatatcaccattaacaaagttgtgtacaaattgtagttggaaggatgctgatagcctctgctagctctagtgtatcatgtagatcagtagatttgcttagggcggctgcatgagtaaatatttggttgagatctcttccacaatgcgccttgtatattagtcaaattccttttttattatgtgtaaacaaaacatcccatcttttatgaggcaaaatcgcactatttagtcttaacgggcgacacatacgcatgagaaaagtgccacttaactaggtttggatgaaaagctcgtggctagttatcttgctcgactcgtgtctggctcggtttgtttgaatttgttaacgagctgagccacggttttagctcgttagctatagagccaactcgagctgcttaagagccaaacgagcccagcccagcagttaacagcctaatctcaaaagcccaagtgcaaagccccacaaagaaagagcaaccctagatggatcgatccctcttttccccttcttctctatactgtatgtgcgtatgccgatatgtgggcccaatgatttctgggtccacatgttagtgataaaggcgcggtgcagtcaactacagcatatcctaatcccatctccattccctgtctccctctctcggctaatcgtctctctctctcacacgacatcagcagggtagcccttcggccatcgccgcatctgtcgccccactccacgcttgatgactcttgcctcgccatcccctcatccagctgccgctttgctcagtaatggagcaaacaccgccgccgttgtgaagttctgaatctcgaggattcgaggattagtaatcgttgtctcacaagtgaatcactagtgaagtgttagttgcatgtgtccattttcttgtgtggaattctgatgacggacttttggttcatcagtatgggtgaatgaacggatgatgggtcatgtatttgctgttttacttgcccggaagtatggattacagacttttggttgatttgcaaaataattcctgaggaaacaagcatcgacaatcctccagcaacattgttgttcccatctatagcattcatacaagaaattggctttacaaaaggaatatcagtgtccacagcctccttttgcaagtttgcaccatcactacggatttcagaattcgcagaagccaattgcacggcacattggcatacctcattcatcagcttggtaacaaaaaaggcaggaggttggatctggtatgaatggatacatttatcctcaaccattttggaaaccttgtctaaattaatggagaacctcaaagggtcgaaattgcatttcagtggcatatatcttcacctcacccatagtggatgaagctacatcaagttccacaaagtgtcccacttgagtatcttgagaagaggaagatccaaactcattcttgcaacctccgactctgagtgcatggaggctgctgtgagcctgtgatgaccatgttctcggttagctgcccacctgaaggatcccaacaataaatcatacaatcagaacaagcagagaggtaacatgcacattttaatgaggtaactgatagtttcgacttttgttacatacgcacgcaatggtatgttcatctaggaacaaacacacggtatatacgaaaagaaaatattgatggaatcgaatacctgaagaagcaacgatgacttgttaagactcagccatgtgctgctgcttctgctttcctcttgtaatgtgacctgcaatatatattatatatgtatgtatagatagatacatagcactactcaacaagagtaaggagtattagcataagaacacacaaccactactacaataaggattttcccgtgcagagcattcgaccgtctggaagaaagtgtctgcgaaaatcacgattttttcgtgcgggcgacgcgggcgcttaagccgccagcacgggaaaatgaaaaatcaaaaaaaaaagaaaaaccaaaccctaaccctaatccagccgccaccgccaccctagtcgaggcccgccaccgtcgcccccgcggtcgccggtgccggatccgctgcccgctcccatcgctaccggggaggggagagggaggggagaagccacgggccgccgtcgtcgccgccacctgcacccgccgccgccgccgccgcccccatgcctcctctccgctggatctgcaagaggagggaggggaggggaggggagccgaggggagtagaggggaggggccgtgtcatgacccaaatattttttttccgtgacagtctaccgtatccttatacgcatatatactaatatttatatatgtccataaggatacaaggcaaaatgcaatgtctaaccatcataactggagcttagacacctacagtggttccatttattattattacttttttttcaccagctatattgcatattacatcggttggttcacttaccaacttattgtcactaggacgataccctatacctagcatgcaagtatgtcctctgggatacctctaaagtctaagtagaccacactctccactaggtctgcatgtcaccatttccctctgacatctcatcttgactagtttctgcgcacatcaaatagtaatatactcaataagagtaaatttcacaaaactacaggtattttgcacaatttatcacaaaactatagatttaagagcttgtttcacaaaactacagatttagtgccttcatttatcataaaactacaggtactttgtacaatctatcacaaaactacagatttaagaacttatttcacaaaaatatagttttagtgtattcgtttatcacagtgctacacatttagtgtcttcatttatcacaaaactacatatctagtatctccattctcacattgctaaaacgtgtagttttgtgagaatggagacactagatatgtagttttgtgataaataaagatattaaacctgtagttttgtgaaacaagttcttaaatatgtagttttgtgatatattattcaaagtacctgtagttttgttataaacaaagacattaaatctatagttttgtgaaactagttctaaaatctgtagttttgtgatagattgtgtaaagtatctgtagttttataaaatttactctaataataatatatgagtatgttatacatacttagtaagattagtacatatagctatatatatgttttaaagacaaaagaaaatactactacctatagatattaacaaccaataaataataaaggacattgaacatagtaaatgagttaaatccacactgcagaggtattaaaataatcgtagtaatctcgttcctttaacccatttttctcttcaactagtgataccctcatctgagaatcacgccgccgggttccctacttgtgtgaggcattccttatctcacattgatatcagccgacccgatatcgttatttcaggtatcggctgtctcaggctaagtatcacaatcacgttattattctcactgataaaatcatcaatacattattcgggtgttcataatactttctattagattcttagtatcaccatttcaatataatattggtaaacaaatttagtcatagtaaaatagttaatgggtgcggtcttgctttgtcttccgttgttctttctctgcgtcccacctaatcaaatatatagatcttcgatattaatttatatctatatttttcatgcagaacattagccactgacataagctactagcaccatagacagaaagaaaaccaacatggagtacagctgcttgctagtaactactagtctctgtactagccactacaagtactaacctttcgcactaatatatctacctcctactacatttagtacacaggatcataaaaagcaccctaaaaaaatatggtaagtgtagcagcctactagtaccacaagaaattttggctaatctagctagcttattactagctacttgctagatctgaatactattaaaatgtaacaatacacttgccctgtgctcacgctggcttctatggtgcgagtagtattcctaggtttttgggaggcttttataggagaagcttcattcgggtctaaggagacacatgcccagtttataagaggaatggatagctttcacctcctggacatttatttgtccatttttttaactagtccctacgatcctattcacaggtgcatgtctatcatatcccctttggtcagtaaaatatactaccctctccattctttctgtttctatctttttcacactttaagttcacaaaataaaataataataataataataataataataataataataattattattattattattattattattattattattattattattattattagtagtagtagtagtactactatactactactactacagcaggccacacgtggtccgccaccgccacccccatgcctcccctccgccggatctgcaaggggagggaggggaggggaggggccgctgcgcaccgccgtccgcctccgccgctgtcgccgtcgcctgcgcccaccgccgggaggagatcgaggagagaggagtgagagagagatcgagagaggatagagaggggtgagagagagatcgagagaggatagagaggagtgagagagagggaggatagagagagatagatcaaccggataaataagagagagagggggaacttaggcccacgcggatgggggagaggagagaaaaaggaaaaattttgaagtgggtaggagggaaactattttcccatgcggttctcttgatagatccgcacgggaaaatcggcgcatttttgcgtgccgattttcctgtgcggtgcgagttaccgcccgcccgcaatctaaaagggtccatgtccaggaaaatcttttcagtagtagtgcacagaagtagaaaaaagtttttttttcttcccatcttttctggacaacgactgatagagcaacatcattgagcgcaaccaaatcaaaccaaactcctcccaacacacaagaaaggttttgcgatggattagggggagggggcgagagagagggagataaaaaaagcaaatgtgcatgcaattagaagggagcaatgtggagtagggttccttctccctctactctcactcgcagcacaagcgctgccttgccccgccacgaggaggaggatgaggaaacccattaatctttatctattataaaaattgaagatggttctgtacttatatcttcatcttttttttcgttcgtcatgatgtctccgatacaaagtagtttacttttattcggtcgtatgtatgaaaaccgcactttattgttacaggcagtcgggctgctactgctgcctgctgctatgcatgccgttctgttggcttgcctatccaagtacaggcccatatggccctcagcgatagtccatcagggcgtttggtaagacccacaacccacctggccacctgagagcgatgcgtctctggctgtgctcatatgtcaaggttaccaactctccctccccattttcggcacgcacgcttttcaaacggctaaacggtgcattttttataaaaagtttatatatgaaagttgcttaaaaaaatcatattgatccatttttaaaaaaaaattaagagtaaattgcatattgggccaccttttttaccattgtttcaacttggaccaagtacagagtaaccttttcactttggaccacctatatatgttgtttcattttggggcactcttccacctttaactccatcgatcttctctctggcctacctgaattacatgtcgcactcattctcaagctctgctgatgcctcgctatctcaagtcccgttgttatactctacctcgagctggagtttgacctcccaacaaccagggagatcgatcttctttccaagcgcgtggaggtgacgctgatggagcttcggtacgagcactgatgatcacttgttggtttgctcatggtggttcctctagccctttgcagtcaagaaagagagaagaaacaaagataagagagagggagctggatgtggaagaagaggcccaaaataaaacaaacatgtaaatttaggtggtccaaagtgaaaagattgttctatccccagtccaaattgacacaatggtaaagaaaggtggcccaatatgcaatttactcaaaaattaactaataattaattaatcatgcactaatgaactgcttcgttttctgtgctagagggatggttcctaacccaggcaaaagaacagagcccaatatattggttgcaacaactcaatttggatatctatcatcttcctcctatgtcctatggattcatggaatgattttcgactgtacgtgcatgataatacagatgcattacgttaatttgttgccctgaattgattaatttgccatgtgtctcaacacaagacaacaaagtggcattgtcgcataagagagaacctgcatattctgaagtgtttaaaagctgggtggatttattgttggctcatcgtggggtggtgccgtggtggcggcagatccgtccgttgtagagtcaacggcgttggcaactctcgccgcccgcaagcttcttccttcagccaccagttgcttcttccccaccacttcatgggggcgggggcggcggatccacccgccgcagagcccacggcgacagatccgcctgccacgacgccagcggcatcggcagctcccatcgcccactagctactccctcgtggcattttttggggccgacgatggcagatccacatgttgtggtgccggtgacatcggttgctcccaccaccagctgctcccgccccaccacttcgcgggggtcggcggcggcggcggatccgcccgccacagggtcggcaacatcggctgctcccaccgcccgccaaacagctaccaagctctgtcccgccgccccgagaagatgagcagatacggagggagagggaaagaggggtggaaggtagagatggcaacggggaattcaccacctggggttacatccgcgtccacgtccccgtcaccgtggtgttaaaaatttcacccaccccgtcaccacgcggtgaattaatccccgtggttactcccgtagagagaatcaaagaagggacggcgtgctggcgagtggcgagttggcgacggcgtgtgtggcgcgaggacagccggaggcggcacaagctgcaagagacggctcaagccatgtccccatcgatcgatctatctcgcagtgaggccgaagccatggttggcagatggctggaggcgcgacgacgactaggggcagcgggcgatgcgacgtgggctggaggcgacgggcggcgcgacgagggctggagacggccgtgcaaggagccgaggacggctggaggcggcacgctcgttgatggacgatggccggaggcggcggacgtcgcgatgatggccggaggcgtcgggacctcgcccgcgcgaggagacgcggcgacgcacgcgtgtgagtctcgagcggccgcggcggcgctgtggagtgaagaggaagatggagaggggaaagggaggattatggttagaatatacacacacgtggttattggacatcaattttatagaccaaaacgactataaagtctaaaataggttcctatctacgctaaatgagggtcaccgcgggggacggggacggtgagtgagtggtgcaccgtccccggccccgccatccccgatggtgatgggttttggaccattagatcccctattgagggtagatatcaaccatccccatcctctaatgtgtgaattcactgtggggaatcggtgatcgggtccccattgccatctctagtggaaggaggagaggggtgaagacttaagaaaaagagtccttatgttgtggaagtaaggttgtcaggatcggaatactagaagtatcgttttgctcaaagtattatcgtatcctagtattgggatactatgagattttattttttttaagtttaattaatatttatattaatcacatatagccattatatataaaaaatatagtaataatatatgtcatacaaatatagatatttatcaagagaaaccacgttggctttaatatatttaactgatttctatataaacttgagcatatttatttacattttttcaaaccatcttattttaaataatattttgtagtatcgtagagatcgtagaatcaggataccacctaagatttcgtaggatggtgtagtaataaatagtaggatcgagctactatgaaaattttgatactagataggatcggtatcattttggtttagtaggatcgtagtatcgtaagatactatgatacgaatcattgtgtggaagtactatcttttgcatgcaggtctcctagctatccatcggcgaaaataaaaatattttataggcaggccacgatttttgcattcgggtcttgtctccctcgggaccgatagtattggatatgttactgtccgtctgtgaaaaccatttctatagcagtgattgcctgttggcgtaaacctctagggatgtacggagtacatagcaaaagggaaaaacaaacaatgaataagaataataattatatgtaacatgaataagaatagtgattatatataagaatataaaatactatttggatatcccattccaacgccattgccctctgttctaaaatataagtattttttgttgacatcgatacagtcttcaagatactactttgaccaacaatatctataagaataaaatattttaaataaaaatagttgcatattataatattttgattaatgataaatcgagtaacatcaattttacatgatatatatatttttatttttttactattaatagttaaagttaaaaattgttaacttaccattatgctaaaaatgcttatattttgggacggattgagtagttaataggagtaattaaattgagaaattatgatggaggacgaatatgggctgtcataggccttctttctgcgcgctaaggcccacacggcccacctagaatcggaaaataagaaggcaggccaaggcctccaccctccatcggatcggaaaggaaaccctaagcgaagcggaggagagaaagcaatggcatccctgagcaagcgcggcggcggcggcggcgagggggagggcatcctggcctccttctcccggtcttcggtggcggcgcatgggcgcgaggcggcgaccatggcgaagaagctgctgcggagcacggggaaggcggcctggatcgcggggaccaccttcctcgtcctcgtcgtcccgctcatcatcgagatggaccgcgagcagcagctcaacgacctcgagctccagcagcaggcgctcctcggcgggccgccaccgcccgcgcctctcaaatgatccatccgtccatccttagcttctactgctgcctacctatgtcgtcgtcgtcgtcgtcttagtctttttcttcttttcttcttctcttagtgtacactgctgctactagtgtttttgcctgtctagtcggacaaatcaaaactttcttgttttcatcatcgatctatgctatgctgctctgatgagatgtcgctttttctttcctgctgctactttattttcacgctcatcttatcatgccgaataaatcgatcggttactatatttcattctgtgcgattcctgtgccgtttattctttctcgtcatatgctgttgtgatgagatttcaatttgcatcaccagggttactctttttcttttatggattgacatctccatgttcatgaacaacagttagtataataattaaggtttttttaaaaaagaaaaaacattatagtctgtaataaaaaagagaacattgtactccagtttctaatgttggatcacaaatgggaacttaagaggatgatttcttattcataagagtaagactcgagcaatgcatatgttggtttgttacgcccccaaaactttgggaaacagtcatgtgtgtgaaggtaaccaaacattttgatacaaacagcactactttattgcattttgatacaatcaacactggagtactttttattgggtactcctacttcctccaaataagtgtactagggtttatatgaagtaaaaccataataattcgtccataataattgtattccttctgtcacatcagaagaatgggagagcaactgagcagagcactagcagagcaagtaagctattctctcaactctcatccttattcatcctttttttttctgaagtaaagcagtttctaacttgtatatggccataaattagagatttggtgtttgttgttattggatgcacaactatttactataatattttttagaactatacatggcgctatactcaaaacaaagttgggaacccctctcattttactctagctctgcccctggctcctgtggtgcaccgccgttgcagtcaacatgtttcgggggctcatggccgaggccttctgagtgcttcgcaagctcaagctgcccggctcatggccgaggccttctgagtgcttcgcaagctcaagctgcccgtctctgggtatgggatgaatattacgttggtcgaggtaggaccggtggtgactggtgagggaggttgtgccgtggcagcggcaatgctggggctgactgaggtaagtttctgtttgtccctatctccaacttggtgttgaaaaagaaaaggatttggatggtgagatttggacgattgattcagtgatttaccttgctccctgttgtttgtataaagtttgtaatctgcgaatctgaatcattagacagcaagatactaagttgtataccattaaatagtgttgaaacagaagcacttccctcataagtcttaacaataaccatatttctccattgtttgctctgctaacagtattaattaagattgtaaaactgtatttattttatgtgccttagttctaatcttatggagggggaaaaccataatgtttacattttaagtttggcaggaaagttggccgaaattgcagcctacagattttatttctagattctatagtcattgttctcaacttgataagagcaaaccctgctctatttgatagctttctttggaaatgcttctttctaacatagaattgttcagctgacatcagtgttaaatgggaataggatatgcacaaaagcagaggttgaatccatacactcaaacgatgtagatttatacagaaatgttttttctctcaagctttgcaggtcggtttttgccatttgttactaattattctgatgcataactgcatttgattctcatttttataacaaatgctgccctgctttcttcaagtacagaggccaggatcatttttgtcggccatgattgtggatataatttctagaaagctgccaatggcatcaatgctcttcacaagctatgttttcttaatcctgctaattttctctcaaatggacattctaacaagaatctccctgtttggagcctggttttgtatatctgctagcttcacaattgtatacatatatgctggagtgcgttcagttctctctcacatacttcactgttacttgcacatagtagtattttttgtgccactgttctgacaatgatcatttattggtttcactatacttacatgactgctgcccatctcttcagacttcactccctgaggagattcaccataacaatacagtgagtttccatatatttttggcattgattttgttacttaattatgggtttaggattgattggacaacctaccttgcattgcttaattgaagtgttactacattgttggttacatgattacttgtatgccattgtagctttgatttggggcctaggaccctatttcaccctctgtgccacggtgcaatttctgatatttaattgtgtttgcacttgtttaccagaatggcatcttaagtgcaggtttcgtcttgttgaagaattcctataagctttgtcattaggattacagcttggctaagctattgtgctattgaccatatcaaggaacatgtttcttacctctcccacggattagctgcagttgtaccgtgttgatgatgtgagattgggtagcctcttccctgtcagtcgaaggcctctcccgtgccttgtcgggttggtcctctggattaccaacctgcggtaatgtgtcgatgtcgttgcccagccaaggcggtgagggtggatcttgtagagcatcgacaaccctgcgcggtggtattataagtgtcaaaacggtcgagtaaatgatggattttggctgattttgagatgaagttgcatatacgcagtcggtgttcttcggggttgaatgtagggtttcttgttgctttggggggggggggggtgatttctaggttcgggtgacttgcgagacgctgtgacttcgttgaggagggaaaacgaagtgctgtggaaggaggttcaacagagtagggcatagggggaagaacagaggaaagcggtagatgatgtaaggagtgtggttgctctgaacaaagaagaaattagaagtttgaaggccaggaaccaaaagctagataatgagagaaatgtgcttgtaatttgtgttttgtcatgtctgtttgtggtgtttgtgttgttgtttgggaagaactgagattatttgatgtgtggtctataatttgtgaacaagatcgtgtgtttggtatgcattggaaacaacatgtttttcatgaactatatgtatcctgagttgtggtaaccatttggaatgaatgttgtgaatgaatggtttatatgtgcaatttgtgcagcaaacctaaataatacaccaaatgttcaatttttgaacatgacaatggcatatgtttcagctagttgcaaacaaggcacttttggtatttgcaaacaagcagaaagattggatgatattgcataatggaactgaaatatttttctccatcattcatacaaaagcaactgaaattgtctgacattacatctcagataggtggcatagttagccaaattgtctggcatcacaacaaacatagcagaagttctaggctaataggtctgacattacatcacacatagttggaatattaacccaaatagtctggcctcactacgaagaaagctgaaatactgggctaatttgcttgccattacatcataaaacaagtacttccattactctaacagtagtaaacgtgccatattcagagcttgttagtttcccatgggggcagaagaagaagtgccccaccagatttcttctttttcttggtttgtgtaggttcttgagttgagacacaaacagatgctttgccaaatgtgagtctcacatatgaagttgtagagctctaggaatggggaactatggcttgcatatcaactctagctgaaccaccatgttctatagaaactttagccttggcatttaaccctgaccagctcctgggtctccattggtgcctgcagtcaaatatatttgcatatgttgaacttgtagtgattacaagtaaactttgcaagggagaaagatttgcacataccttgttcttggtttttttttgggccatggattgttgggttgtacttgttgtacacagggtgactgtcttcgtcttcgtgctttgagcagaactccctgctgtgcttgacaacaccatttgctgaccttgagatagagctgggacttgggccgtgccgggctagcacggcccggcccgacccatcgtgcttcgtgctagaatgggccgtgctggcccagcacggcctgctaatcgtgccgggccatgctaggccgaggtggagaagacaaggcccaagcacggcccaaagacatgtcgggcctcttcgagccgtgccggcccaagcacggcccagaattacctgaggagtcgtgtcgtgcctagggttttcgccggggcccgcgcggccgcgccgacccgccgccgccgccgcctgctccctgcggcgctgcccgtgccagccgccgacgccgagagccgccgcaaaggaccgacgtcgtgcggccgcacatagccgctgtcgtcgcgccgcgcggcccgcgccgagggcttcctacgccgagagccgccgccgccgccgaggaccgacatcgcgcagccgcgcatagccgctgtcgccacgccgtgcggcccgcaccgagggctgccgacgctgagagccgctgccgccgaggaccgactcccgacgccccgggtgcctagggtttttgcctctgaccatgtgctttgcccgatgctgattgataaatgaaataataacaggggaaaaatcagggtaaatgagagaggaaactgaaataagggagggaaaaaataagagaggggaaatgaaaaaacaatgagataataatgtacatggcttaatgaacacaattagaattgacataatatcgtaaataacttgagacaataaaattgggggaaaatatatatgttaataatttgaatatatagttgttgcctcgttaaaaaccttacgccctaaagtagggttccccgtaaggaaaaaagagtacaacaactattttacattataccatcaattactccagatcaacaccaccatcatctttggtaaggcaaatttccgccaatgcgtcttccattgcatcggcaaactcttgatcatgtagacagtgttgcgttagttcgtctgcttccatccagtctttaagacaaaatattgacttaaccgtctcgggtgtcaggcatgaccattgttcttcaataattcttccagtaacgttgaatgcttgctcggaagagacggaggaggctggaaccagaagaatatctcgagcaaagtgagctaacacaggaagagttcgctctttctctttccaccacccaaggagatcgacatcgtggccatcaagcgtcggatcatgctcagtatgattggtggcgaggtagtggttaagctctgaatccgggttccatgttgatttgttctctgaggatggagaggcttggtcgttgcctatatactgcatccacaaatttactgcacttgacttgcttgctttcttttgtgaggtctgctcaggaactcggggagtaccaccaagcttggttcggtatagacggaaaaccctatagagctcatcattgacatgttgaaaagcttcagaataatcaagccccactgcatcacctattgagttcatggcaaccttggcggtttccaacttttgcgaggatcaagtatcaaagcaaagcaataaaggtgaggtatagcggtgaagtatttgagaaatttttcttccatgggtttaacaatggaagacaatacgatcagaacggttttcatcaaaaacaagtgccagcttccaaatccactcaagcaccaaacaagatgtaggatagtaaattcctgataattgagctatagcattataaaagggcttcagaaatttatgcacacgtgtagcgatctcccactcatgattggtgagaatcacaatctcaccatcgccgttgtcatcggtatccttcattcatatttttgaaacagtagacggtaggagatctaccggatatattagaagaagagagttgaccctgtttataaggaaaaccgggccttacaactgcatggtttgctaaggggaaactggcaaacccttacacagaagacacaaaaaagcctgtaacaaaactacgaaccactaaagagaccgagggaagagcatgacctttaaggcgaagcctccaaggaggtgaacaacgaccaaagccattgttgacgcccgcccaaaagttggactgggttttcacccaaaggtgggagagagtccacaaggaaacacctccaaggagggaatggcacccgtaggagtcgatgttgctgatcctgaaagaccaggcaaggcttacacccaacactctcacaaaaggtgcaggacctccaagaagccaaagtaagagtgttgagtgttatcgttgcccagctcatcagctgacccgatgcagcagctccgactccgccttaacacaagaactctcgcaccctagaggtaagcactccggtccaaactcggaaatacagcaggttcacacggtcacagggcacaagaagcaccggcgaggcccaaaagccctgattacagtcagactggaccaaccccacggacaaacaaactcctcaaccactgagagactccacggccggatctggaagcagactaccaaaagaagggaggagcaacaaggaggaaaggaggcaggcaggcctggggaagaactgagagctggaagcagggcaaatgggcatcggtgtcaaccatgtaaccggtgaggagctccaggcttcgcgggatgaacctttcgactgcagcaaccacctccaacttcaccaccagcacagagagaggggcactggggtgatcagcaaggctcctagacaactaagaggaggggggcggcctccccaatagcttgtgccaagaggcggcaaatagagaagagagaaagaaggaggaaggaaagggagacgcatgcctcccccaactgctagtgccgagagacagcagcgagaggaagagagataggagggaaggaaggagagaagagggtggtttcaggggaatgggggtggccggagacgctagcacaccccccagtatgacccgatgtgccgcgaccgcaagagccagctgccgccgcagccccacaagagacggcctctgccgcccacatgccggccaccacccacatgcaagcaacaccgccgccgcacaagccctcacgctgcaatagccacgccgcctcaccccgacgcgccgccgaccaccggagctggcagccgctgcaacggcaccgcgagcgccggcaactgaccacacgcgtgaacaccgccgcctcaccacccatcgtgctgccccgtgagccgccacgggccgcagcggccaccgctgcatcgcgccaccccacgatgctgccaccagagctttcccagatccgatgacagcggtgccggatctgccgctgcctaaccgggaggcctccctgactgcactccttgacaccagcgaacgccaactcccccacgtagagagggggcgccgccgcggaagaggccctgccgccgccatcctagcttgccagtcggctttgccggcggtgagctccggcggtggtgaggtagagggagggggagaggggagcggcggtggcggcggtagggtttgccccccgtgtcgcctgcgcgtgggcgatgcgggggggggggagggggagggggacagactctcggataattgtctagttgtatccttcattctgacatgcatctaattgatgaaaacagaaattaactcctcctacccttttaactgtcgcagcaataggtatgttttgttccacctatgtttgacatcaatgccaaacatccgtccaggtttcttcttcgctttacagtagtcctggaacctcgctttgaccactgtgttacctcctatgatacgaacagaatgacgaattttgtttaacaatttatccggaacaattatgcctgcaaaacaaataggtcgcatacattaaaataaataagcaatatgccgcatacactaaaatcaataaattattaataacattactacctggttgaacgatgagattgatgatgtgacaaatgaatctctgatgaataacgaagcctccaacataacttcgcagatccgactccaaaatcgatatggccgttgtgtttgctgatgcattgtcaagagtaatagaaacaaccctagattgtaaattgaattctctcaatacctctaggattgtcgtggctatggcatctcccgtgtgtgacgtcatgagttggaaccctatgactctcttatttaatgaccgattgttgtcaagataatgaagaacaacactaaggtaagatgttctttggtgttgggatgtccagatatccgatgtcacagcaaatgaaaaactagtagtactgaaagtttgcttcaacacactcaacttagaatgatatatagctgtaatatcgttcttggtggttttcctagaaacctttttgtactgtgggcaaaaagctttttggatcattctctcaaaatgtttgctttcccccattctaattggtagatcctcagcaataataaacttagcaatctcttctctagctatttttggatcatagatccatgtacttacagaaccgtcagagccgaaggacaattgtgtctgtcttgctcctgccggtgccttgttcttgagatgcgccaagtaatgccggttgagatggcctgtccctgaagaagtagctgcagacaaaattttgtcgcaatatttgcattgagcacgaggtatacttttaccgtcaaccatctcggtgaatacttcgaagtgctgccaacactccgctcttctggcagatggctggttattggaatttggtgtgggcaacgtcatggcgttggtgtcgaaggagaagttggcctcgctaggagatggctgatcatcgtcgtcgccctccagaccatccatgtggcgatcatgcatcccgtagtcatcgatgcccagggatagctgtcgggcatcgaccgacctctgggatggaccggttgttgactcgtgttgacgctttttggacctccgcatattttctatgaaaaatagatacggtggggagatgtgttgaaagaagaagaagtgtgttgaaatcaaaaaaaatgggtatggtttatatagggtatgctagggctgggcgccaggctcttcacctctcccttgcctcctcggttatcagccggcgatgcgtctgaactctgaacgactcctcggcggctcgacgccttgactgatgacagatcgaccaatggccatgccgtgccatgagcccatgacacgtgactaaacgactcctccgtgctgaatactgatcgaccaatgatcagtcatcagtcgacacctcgaccgttcgatgcgtctgaactctgaacttccacgcaaatgaacatgctttccataattccatgcatgcaccattgcagtaaacaaggacacaggtaattagccatttaaaaagttgaaaaaacacaaacaaaaatttaattgactagacagtggatatacacgatactaatcgccaatggtaagtgatcccagaattaattagccaaaaaaatcatgctttccatgcatgcacggctctctgaattctgaaagactgaaagcactgctcataagttactgatcagtattcagcgcagccgccggctgacctcatcagttactgaacgcatcactgaagtctcaccacgcacgcacgcgctcggcggctcggcgctcctgcctcctgatctcctcccggccggcccgaattgcacgcactcctaactcctcgcgcgctcggctaggctagagctcgggccagcctttgggcctttttcgtgctgggccggccttcgggcctacgagcctttttcgtgctgggctagcccaagcatggcccaactacgggccgtgctagcccggcccattgccgtgtcgtgctgggccgtgctttccctcgtgctaggccattgtgccttggaccggcccgagaaagcagggcccaagtcccagctctacctggagatactactggttaagaaccaactatgcctaaaccggctataagttcaagtgccttaatttggtttcggtgattaatgacaaatctaattatatgagactaacgtttttatgagcctttctttgactagtctcatttggatatggaagtaaaaatgatgagaggtatgtattaaacttcacatattctaacttggtctctcttgtggatccaaaatatagtgtgagcttcctatttgatctttattgattatgtgcatatgtgttccttcatatccatatgtatgcacatcttgagggggagcttattctatattttgtttattataagatttctatcttgatttgaaatcatttttcatctcatctctctgtattgtttatatcgggttattatccatcaccaaagagagaaaagattgaaagatcttggattaaacaatttgtgtaattgttactttggtgatagatgataaaccgatgtttatgggattaacctctcttttgcataagttgtctactaggttatttcccgataatgagatgtggaagacatgcattcttttgtgatggaccttaatcatgacaaggatgaaatgcatggagataaaacgatatgtaccacttcttatctcctactttttgataggttcatatatatgatttccatgttattgatatataagtgtgagactaatgtttactcgaatgttatcttatttagtctcatttacattgagaacatggagatcatgaaggtataagttttatgttggtctacatcattactacatatgccttctctatatgtataggataaacccccattggtcattctctaattatgcatacacttgcatctcttgtatatttatttgtatgcatatatttagggggagcaaatcctatacatttattgtgcatgttctagatccatgttgttcacctattatttatatcggatctttgcacttgagcttgcatacgagtatatgacacttgtgaagttaatgaatactcaacaaacatatccatatctttcatatgcaaccggttggtcttcaagtgaaggatgacaaccgatttgttgagactaatgttctcctttgaggtgtgaaaaggaataggtcccactatgatgaggctaatgaatgacaccatgggttagtggtcatcaagccaaggacatcgtcatgttaacaagaatgaagtcaagcttgtgatgagaataaagtcttgacaaaggatggacaagacctcagcataaacatggttcaaccggatggtcacaagtgttgatctcggctcaagcttgaccccaagatggatggcgcaaggcaaaggtataatgtagctaagaatgttttcttagtcttttcccggtcttggtgtttggtgtagaccggatttgctagatagacgtcgtactatcaagaggggtctatgaagcgagcttgtggatgatcttgtgccatattagttcatatgcatgtaggtgcattttgtgggcttgtctaaccaagtgtgatgagttttctcaagtcctaaaccaagagagaagtgggcatgtccaataggagtgagtgacatcttgtgggtatgtccggtggatatcctttggagtgtgagccctttatccttgacttaagttgtgtttcttggatggatttttcatgggttggatggccctttgaataagctttccatagagtccaagaacgccaaattccgagacccgagtcaagagatatcgccgttttactaacggtcggttgagctgaaaagtgacctgcggtctgaccgtgggcattaggccggtctgaccgggtctgttagccggtctgaccggcgtggtaaggccggtctgaccggccccactggtttgttgcactggtctggtttttggtggcgatacagagctgccagagccgcaaccggtcagaccgagccgacggcggtctgaccgagccgtggacggtctgaccggccactacactgcggtcagaccggccaggttgagtgggctcaatgattgccctgtaacggctagttttctagccgttacaaagtagtccggtctgaccggcctcacaacggcggtctgaccggcagagcacaaagttggggatttcggttccaacggctagttttggtggttgggggtatatatacccactccccagcagcaagggtaaggttttggcactccattgcattatcttgaaccccccttgcaagagctctcacacccttgtgcacttagtttatctagtgaggtgttagagagtgagttaagccaatccaagtgcattgcttcattgttatagctagtgtggcacttgatcatcctcggcaagcatcctagacttgttactcttggaggttgccgcctcctagacggcttgtggaggtgttgcccggtgacctctccgaggagattgtggaggaggcccggcaccgtttgtgagtggtttggagttcaccaccttcggagtgaaggaagaactaccccgagtgatcgaggcttgggtagtcctctccgtgggccggctcccgccttgcccaccccttgacgaagggggcgtgcggtggcttcgtggttgagcggtggagttgggctcgcctcaacggggattaggaaaccggcgagtttccgaacctcggtgaaaaattccttgtctcttgtctcatttatttgttgcatttacatttgtgctatttacattcatagagatatatttgagcccatatcacttaggtttgcaaaacttaacttagtttcttagttaaccttgcacctcaccttgcctagcaacttatgttagttttgtttaagtgccattaagttttaaaaccgcctattcaccccctctctagtcggcctccttgatcctacaccggcaacattatgctttgcataccaagatttttggtgcccaacctgcttgcaccttgtgcatctggtcactgtcccaaacttggacatttttgttggcttgggtggtttatgcatttttctgctccttccagtccttggtatgcctggcatctttatgtatctaggagtattgagtggctctctatcatcctggggccaagaacatatgtacttctgaaggcttccacagagtaacaaggtacaatgtagtcatctagctcgttggttctataaaagatgcatgatattacatagggcatggctaccagtaactataggagcattctttcttgtccatgtgtactgtaaatctatgttcatggtgcttaacctcaaaacgatcacctccattgcaaatggcatggcagaaagctgactcactgatgtatacattaagtttttttcagaatacctaggcatacaacagttgtccatctagcaccatttgttttctgatcactgatcctaaccatcatttttctcctaattttcttaagcattgtgattattagataaaacttagattctagtttccatttgttgaaagattcacacatgttgttgtccactaagtcacagttagaatctaacctgaaccatgctttgcttaggatgtgtgttgaggatgggttgtgctccagcctgaatcagctgaacaagttttgccctagcaaggttaaataacatcccgcaaggagcatttgcacacttccaaaacttcttttggaattgcttgtcatggaagtgtctcttccgattagcatgtgcctagcgcagttcctgtgtttagcctcaagtgcccatttctgcacagcattaaggataccctgcatagcaagtaaaaaattgagtcaggaacatgttatggaaaatgagaggggactgaattagttatggaaaatgagaggggactgaattagtgtgtgatcatattacctcttgttggtctgaaatgaagacccaaccagctccagtgtcaatttttaggtcactgcaaagcaaatccataaaccaatcccattactcattgttctccttggtaaccactacccatgcaataggatacatctgattgttagcatttctccctgtagcacatagaagctctccattggttgctcccttgaaaaagcagtcatctagtccaataactctcctgcatccagctgagaatccttttttgcatgcatctaagtagatctaaattctcttgaaaacttgtggattcaagccaatttccctgttcacaaccacaatgctaccagggttacttctgagaagctcaagttgataattgaacaacttttggtactgccccctagtagcatctaagtgtttcttcataaaaagccactttactctcttcagctttgaaacagaagcttatgcaaagattgatttgagaatccaaaatagagccctacttatgacacatttgcacaaattttacagcaaagctcatgtaccttgggtaaatcttatttggtcctcttattacaaggacacagttcctcagattgtgagaagttgtggttcgttttggtggagggacatctttcagtatgatatattgtttagaggcattgcaaaacaaattataggctctgggatagctattcttttttgggatgatttatgggagggagttatacgttccgtcaaatatccccgtttatactccttcgcaaagcacgggaatgattctattgcacaacacttggccagaggcccccaagatcaattcttcctacccctctcgcaacaagcgtttgatgaatatatggacatgcaagaaaatctccaatctcttaccttacggaggttgatgattcatgtacattcatttggggatcagggaaattcacttcgcagctctgttacaagctcagttttctagctctgactcccccacctactatcaaatggatatggcagtccaaagtcaatatgaaaataaaggtctttaggtggctcttcttcatggatagggttaatacaagggatctccttgatagaaaacactatgcgccacccaatacttcagtcctttgcctctcttgctcagctaatgctagagaaactagagatcacctgttcttcctttgtccttttagtttggcttgttggagtcgtctgggatggacatggaaccctaacttggattttcatcaaaggatccaggctcaaaaagtggctgtcttgcatccttgctttatggagctattcttaattgcctcatggaatatctggaaggagaggaatggacttattttccaaggcatccaactctcagtgcaaaactggttgatgaacttgaagttagatttgagcttacatttaattaggctcaaagaatgttataggcccctagttcaatcatggatagatcaattgtaatttaactgttttttccttcccttttttgcctttttccttctttgtacatatttctagaaaattaatataccgtgggggcctcccccactgtctttggttcaaaaaaaaacagaagcttatgcaaatatttcttctttgactattgctttcatgtcagccaggggccaagaaggattgacagatatgaagttaccatacttttcagcaatcctaacagaggtaaccatctagttatccctcctaggtggacaagcatgcaggttctcaaatataactatctgccaactgtctgaccttgaattcttggaaagaagacatacccggggaatagctaccccaatcacaatttgccctaaccctcttggcatcatccctaacaaagttaatgactttcttctcagcaagagcatatgttgtgatagctttcttcaattgcttcttgcagttgaacttcatcccaggttcaaatgtaggaacacatgccttcttcttgtaccttggatgttgactacttttcattctcacctccccatcactaccaatttcctctactaactcctcttcatcattgtctgcatatggggttccattcccttcttcatcactagcttgcattgtcggttctgacctctggctttgcaagaaacaatcatctaggtcctctagctgccctgccttcacctttctcttagtctccttgtagtgcttctctatctcagcagcctcctcctcatcatctgtcacacccagaaattcactagtaatttccgaacttatttgtgcattaaatcctcgtccaggaatcagccgaggtacacaaactgacaatttaatatacagattcatcataataataacgtaaatacttacaaaagaaaagaaaaacaacagcggaattacggtctagcgaagctctggctccactcccacaggcagctcaactggggtataagccaaacgttttctccttcgcaacttgtcttcaactgaggtttgattgattattgcaaggtgagcatatgacatactcaacaagccacacagcaaatatgcaagtgcacaaggataccaaagaatggcataatatagggctcatttgcaaaagcagcatttagcaaacatttgaggattataaaacagtagagtaattaatcatcaattttaatcaacactaaacagcacacccatgctgctcaggcccaaccatcctgaacgaccatacccggctgtacagatctatctccaaaccaggaatataccattccaaaccaggagctaatcaaattattaccaattatagcatcatttattatggtgagaagtgtgagactaatcacgaaagacattgttagacccgcccataaccgcgggcatggctattcgaatagttttactctggccagaggtgtaccactgtacccacaagacacagccccacaacatgtcaccatgcgcctcaataccaccacggtacctcggaaaggagctgtgacagtacccctcgcacaacacaatccaccatagcgcaccgttcctggatcataatcacccccttataaacaaggcatggactccccagcgacccccgtaggcttatctccgctacttctcagtctgatgctccgcaatgaaccatgctatacaaaaggtaaagccgttgtccacgctggcttgtggttggcacggttaatgtttcacaaccgaaactcgtgaaccggtccttaattgtcatgagcacgaccatcaaaaccatgtgctcacaacccaccattatcaagttttagttggcaaattaattaattaaccaatcacgatcaaccatcgtgagcttccattaaatatccataagtgatagtgaagcatgatttatcccattagtgagctattgtttctaagcatggctaagcatctattataagcatctagctgaaccaaaccaatatataaggttctagctaatcaaattataacccataggaaaataaagtcatctttggccataattaaatgggaaaggctcaccacccggtgacattcgaaaataaatgcacagttcaaataaatagagaatttaaatataggatcaacatgctcaaaggaattgtgtttgggatctgtgtgacttgccttgcaatattcggtcttcaattagtcttcttgaatacttccaacacctcacgaatccttcgaaacgacataaacgacaagctaacacacaaaacgaggaaaaagactaataaaaaccaaataaacagtacataaaagtaaacaaacatgtagatcatgattttagataaatttagagacttgaacggtctcattccgatttcgtatgaattaattacgaattttacaagatttaattccaattaaacctattaaagaaaaagactattccacattaattaaaccatttacagatgatttataacggagatgaaagattaaaacaaacttcggaaaaagattagattatatttggtagatgacatatgataaaaagaactaatatgccattggaaagagtggaaatgatttatattgattttgggcggctgagattaatcttgaccgagtcgaccaagatcggatgacttagattgatctggcaagcgagcctcatgagataccgactcaacgagtcaactctacgtgacacgggatcacccaaatgatcaaccgaaaccggcgaacggaaccagcggctctgaactaaaggacgactcaacatggacgaacgaacgaagcacggggaacacctcgttcgaacaaatgagcgaacgactcagcaacggctgcaactaaatcggtgagctagacacaattcacggtaaagccccggtacggcaaacgataggccggcaggaatttagggatgcacctacagctagacaactcaactaccgagcaacgggctaaagcggcggctaggtttaagcgacgcacggctgcgacacagtacagcagcaatggcacgtcacagcacagcggccagacagcagctagcggcaagcagttacgcacagcagcagcaacacgactgtggcagggagcggcacaacggcagctagacgactagcgcagcggtgacagcaaacaacagcggcacatccggtagcgacggtgcacgggctagggcagcagcgcggcgaacaacaatgcaacaggcacggctgcggctgtgacaaagcggcttggcaagtgcggccgatgggttgaaatctaaaccaaggagacacggatagacgtcccaccgaaccaatcggggagagatagatgacgacggtgaaccggcggcaacacatggagatgacgacactagggccaaacaagattagattagattagatgggattaagaccctagggataaactacactgggaacggcatgggagcggcggttgccggcgaatcacggcacaataacgcaaacggagggcaccgggagcgagaggggatcaaagtgacccttaccaccacttatgcgacgacgaacggcaacggaagatggccggcgacgagcttcgaagggcggcgaggtactgtccacggaggcgacgactttccggcgatgtgcggcgacaacggaggggtggccgggcttcacttcgcagctgtgaatccaatggaggcagcggcgaagcttggcgatgacgggaggagcagcagggcttcgccggagatcaaaacgcgacggcgagcttcgggttgacggcgatgatggagctccggtggatttcggcttcagggagatggctgccgggctccctctccttcttgcgaacccaacggcggcagaggcgaccaaaagcggcggctaaggcggctgctagctgcggctggagatcggaacatgacggcaacccactggttcatggcgaggacggcttccggcgaagtttcggcgcaaggggaacggcggccggggtggagctcgaccttgcggagccgatggaggtgacggcgcaggaaggaggcagatgaggcggcggctagggacggctggagcggcgccggcgtttggagagagaaggagagcgcggggagagcgtttccggcgacggcggcggacgggaaatgagaggatagggagaggacgactagggggtcctttgtataggcacgggagctcgggatcaagcccacaacgacgggaaaaactcgggaaagtctagggttctcgccggaaaaaggaaggatttgatccgcgaaattggaaagaatttccatagaaaattttggggatttcttggggaaaaggaagaggagattgaggggattccattcccgcaactaatttggaaagaggagcaacggggaggtcggattggtgggaggaggcggcggcactgtgcacgagcacggctggctcggctctgtctggaggaggaagatggagtactgtagcgcgggggaggcaaaacagactttcggccgggctgagaggaagggagggaatgggctgaattcggcccaagactaggaaggatgattttattgcttttccaaataaattaaccaatgagatgatctttcaattgttaaaaatactttcaatgctcaaataattccaagaaaaatcttgaacatacttggacactcaaagtatttaatataataatatccagatcatttaatgattaatttattatttaaataattgctaaactgttctttgtattattaagaattgagctctgaaaaatccaagaaaattccagagagtataattaatcatggagaatttaataaaaattaaatccaaccatgctttacatttaggaaattttatttcccacatttaacttcacttgtaaattcgattaataatttattaaataatttataaatccttaaacgaaaatcaggctgtggcatcatctaaaggagcatcatcccctggagtgtaatcactgtcaggttcaccgtcagaaggtggctggctatcaatgggtgttgactcaaagtggtcaacactatcctcctatatggtgtttactctaccattgctttacccttacatccactaccagcagccttagtaactcctttacctttggatacatctacttcaacatccttttttgcacactcttcttcactgtccatttttaattccatgtatgcctcataatcactgtcatcatctgacccatcacacaaatcaataatttctggctcttcaacatacacatctaccacatccaattcaccagtacaatcacatatcaatttgcaagccttgtaatcataaagagcacgaaaacatgtttgcaatgctcatgcaggtgtccaaataatgttccagtgcagcaatgcttacgtaggaaacaaccagtgcagcaatgttctagtcatcacattgcaatgctcacgctggtgtccagataactcaggcaatgacaccttatttcaatctatatatgacagtgccttaaatccatcacaatatttcttctcaataccatctagaacatatacccccttcatatgaaacctaaccacaagagtgttactcgtccatgatatcgaaccccttcatgcagaacaacaaaatagaatgatttagggtgatattaaatttctgctacagatatgacaagtccaaatcccaacttttgcacagaatgccgaataaaatatccccttatcaagtacaacactaactaaataactcccaacctacaccaaatccaagataaaaaaaagacatctaacaatatttaaaattgttcttcccgcatcccactaataccatgcagccacagagaggaaagggaatacctaccaattgcttcggacttcggattacgggggaatccttgctgacactacccttgttggctgtcgcgcgaagctccaacttggcctcgaggtcgcccaaggtggtccgccacatcctaagccatgcctagctccaagtcgagctcgagctcatcagtgaccacacccagctccaagccagtcacgaacttacccgcaacgcactccgccgccccctcccaccaccgtctgctccaaatcaccgtcgacaccagtcgtgtcacccaagccggctcaatctagggtttcggaagaaagaggagtgagggggtgaggtgtcacagtacaacggggtcctaactacccaccttgctgagtcaacgccaagtaggacaaaaccgggtgcaatactactttgggaccaaatgtgacccggttttgtaagttaagaaacatcacatatctgattttgcggttggaggacgattttataatttgatgtcaagtcgagtgacattcgatgtactttttccctcacatggcgcctcgatcggtgggcccaccaccgctcgcccaaatagcaggatatgtagtttgccttagggttaacagcgagtgtaaataacaaacgtgactggcagcatgtgtcaattaatggtgatgactaggatcatctgaaattgtccaaattacaagagagaccaaattagttgtatttaatcgagcatcgaatatatttttataatatatttattttgtatcagaaatgctgatatatttttatcaaacttaaataagtttgactagctagaaaaaaaattaaatgatttataatataaaatagaggaagcgctatattttagaaaggaggaagtatagtctatggttaaatcactcatcgtcttaatttttcgttgctgcaactatcagaaaccatcgcattttcagacccatttgctctagtggttttcacacacgtcataaaaattatcttaatttgataattacatattatgagagcacactcatgtgaagttagaaaccgtgtctaagccgacagtaactgttatttaaagaaattgaccgtccccatccaatatccaatattttcatcggtctccatgtatgtgtcacatcattgtagctagtacgccaaacagcacgcaagttaaaatcttgaccctaccgtatcactagctgatgaacagatattgagaccctagatacaaaatataatatactaaacaatgcgtacatggatagaatgtcctattcaacacatatgcacaaatcacacgattaattacaaaagagaaaacaaataccagttcaatctcaccctaagcaacgacgacgacgacgacccatggatatgatgaacccaaagtaaaccttcgaagcaacgacttgttcgtgtgtacttcacctactcacaaaagagctattctcccatagataaactcacaagtaacaacaaccatcctagctagactccatccttgcactccaagcaacactaatctctccctagctacaccatctctttataagcatacatatatatacataaacataaacgttagtgtgtgtgttgtgttatatatatatatatatatatatatatatatacacatatctatacatatacatacatacatatacatacatatacatacatatacatatatatatacatatatatatatatacatatatatatatacatatatatatacatatatatatatagacacacacacgtatacgtgtgtgtgtgtgtgtgtgtgtgtgtgtgtgtgtgtgtgtgtgtgtgtgtgtgtgtgtgtgtgtgtgtgtgtgtgtgtgtgtgtatatatatatatatatatacacacacacacgtacgtatatatacgtgtgtgtatatatataaatacgtgtgtatatatatatatatatacgcgcgtgcatatttattgcatttaaattctgatgcacacaattatgtatgtgcgggtctacttttattagaaatttagtcaggttacggctttattatctattttcgtctctcgatagtatgtatgtgtgcatcttccatgtgattaaaaacaaaagacgatacatgcatcatgtcgtgtatttatcatatatgattactatataattaaaaaggagatggagaaacgtgctacatgtgtcatctcatgtatttgtgtatatatatataattaaaaaaagagagggagagacgcgctacgtgcgtcacccccatgtattttttgggtatatatatatatatatatatatatatatatatatgatcaccaagcctcttattgtgcattttggtagtttgcagtagcgggcagatcgagtgcatggcgctcgggctagtcgtcgtgaagctggcgctatggctgctcgcgtcgtgcgcggaggcggtggccacggcgctgctccgcggcgcggcgctcctcctcctcgccgccgcgcggctgctcacgctgccggggaaggcggccgacgcggcgctcggcgcggccaggggcgcggtcaccgcggccgtggagctcacggccggcgtcgtccgcgacgccgcggcgtccgtcgcgtcggcgctcctcgaggcgctctggggcgcggtggccggggccgcggagctcgcggcgtcggcggccgcggggctggcggaggcggcgcgggacggcggcgaggaggccgccagggccgtggcggctgcggtggagggcgcggcggaggtggcggccggggcggtggcgaaggtgtgggagagctacgtggacgctcttggcgcgcttgtcctcgaaaaccgcagctgatgcatgcatatattcgtaagtgcaacggcggctatgtgcacataggtaggagtagtgattaacatcgacatttttcttcgacaaagtatagtaattgcaaattagattttgcatgacacttgaatatagaatttttcgaattgtatgtcgaaaaagttatgtatataccgaccgataatttatcggcgtacatagatctttcttaccacttgtctgacacggtaggtttggatcatagtgcagtaaaaacagaacaacattcaaaggttggagaaccgatcgtacaaacttttttggtggggtatcatgtttatgtaataagcttattatcaattactaagagttttacgatgatcttgatgtactttgaacaaaactttaacgatacaatgtttatgctgttatgtccttagactaattataaatggaaagaaactataccaagatgtttgtcctcgatccgtgattacatttcgtacatataagtagcgtgtaaatgttcatatggtgctataactgtttgatccatttcagcgcttctacaaacttaaatagataggcgaagttagattgatggtaattactaattaataattcagtttattccgcgacactcctacagatttgggcttgaaagttgaccatatgctgttccttcgaaattgctcgttcattcgatgcttattctcaatccttaattatttactccaatattccaaaaataaatgaacttctctagttcaactagaagaatgtatttattttgggtccaagagagtacatggttcaaattttccctggaaagtacttgctgctttcatgttcctcctaaaagaaactgctggatcctttcatgctcgttcctaatgtttttaaaaaatttaactgcatgaaaagcgattcgaactaatagaaacttagtcgtcccttcatgctccttttttttgacgatattctccgaacgttactatagtaatactgtatcgtgattgtgaaaaatcagcgttactgtagataggtctgacagtaatattgtttgttgtaatagattatataggtatttttgggactgagtaattaggatcatctaatacaacaaaagggttgattgttgtacgatagaggcatacggctaccgagtaaatttattaaatattatttcaattctccaatcacacaatcgcaagtaaaaaaaccatcataattactccctccgtttcaaaatagaaacatttatatgtgttttccagaatgaatctgtaggaagaaatgtccaaatacattttgaaaaacatgcatgaatacttatattttgaaacggaggtaccgaacacaaacattgagcacaccaaagggtcagcgttcactcacttcacagtgttgtggttggggtctttttttttgggagcagaatcagtctctgaaggccgagaagacaggagaagagcacttctgcccacatctcatgacgcaaaagacccagcaataagtatagttacatccactgaattatgctacattagttgcaattcttagatgctgtaatcaacagcataaataaagtgtgtacggtgcctcctctacattaatatcatatacacaacgatgaggtcataggcaaaatcaggatccctggcacaggccaagatggaaacaaacttaccatgcaaacgtcagacttgtcaactgttgaactcctctcttcagctcgacttggcaagcatcctagccgaatatgaactgcaagcacattggctggtagagcaaaaggcaggctttgcgatagtaatgttaaaaatgatccaagaaccgcgtctcttcagtcaaagatctcctgggcttcgattttgctgtgctggctgcagggtttggtcaaaggtgaatgaatgaatcaatcaatcgataggaaaagtgtgcagaattctgtccatatgtaagagaagaatgaacggtgccacacttactgttcatccttggagactcggtagtatttctcggcgagctgcctctgaccaataagctgagcaaacctctcgtcatgggtgatcacaatcaactggaagttctcctgccctttcctgctctccattattctgtgtcggaaagacagacaggcgcacacacagttagggtggaagctccgggtgataacaatttagtagtaaatctgtagttgccaaaaggaatacctcaaaagggcaccagcaaggctctctgcattaggcccatctagattggtggtcggctcatctagagctaatatgccacagttcagacagaatgtttctgccagtgccagtctgattataagcgacgcaagcacctgaacagtagtgtagataactgtgtaagacatggacttgcgtactggacgtgtcacaaaataattctagcacttatccaacaggtgtactgcttaaaagaagacagcaaacctgtcaataaattgactgaattaccagtgaaaaataaacatcgccaaaatttaccttctggccggcactgcagcgccctcgcatttccagctcagcatcacctgtttgcatgacaacctaaaaggaagttgaaaacaagtgaaccctgacgaacaatccaagaaagttaatcaagggttagctaatttaacttacacgatagctgtatgatcgagtgccagcaccctcagagtcagaattaatgcttatatagtcgatatcttggcccctatatgtctgttgccacagttccttgattattttgtttatctcctccattttcatggtgtggaaccgcataagagccctagcagaaaatataaacacaaaattgtaaaatgcaagttgggtgaaacttcctagcagaaaaacaaacatctgagcatattctattatcacagtcatcccaagatgtaagcccctactccactaatcatgtgtcaacatacaaggcctacacaaaaaataaaggatgcaattcaaaataattcatacaacaagctgtaggtacatgctatgggctttgtgcaccatgtgggcaacagtcttggaccaaggaagaagcaaaagaaagggacaagatgcatgcatttgctgccgcagcaggagtgaactggtaatgctggctgacccctgaccctttgcaccaaggaagtacaaagtccattatttaggaaacgagatactttgctagctctctcttgaagaagatactcgtgtctcatctggtttgctcggtggttgtaagctgctcttttagaagggaacacatctctcagaattattgaagcaaagaataaacaaaggttctctattctcctcgcctatcaaccagagctcagaacgttagtggcagcatagctgatcaatcaaggcacgcccaaccctcagtccttggacccatgccaactagtgtgcaacactatgtggtagagaagtagaagcatgacgggtcaacagtgtcgacggcaccatcggaccaactagcagtgaaaataaccacagttgatctagattctacagatgggtgaacactgcaaatgcttcttagcgaccagcaccgaatggaaggaagccactcgactgcaaatgcttctcacttggtttggctaaactttttatgacctcctattgggtatttatacccttaatgcaaatcttattcagaaaggaagtaaaactgctaatcctaatagattaggtaggtactccctctatcccatgatataaggcatggtcaaacttgacacggtccccaaaactaatctttgtcttataatttctcaaatattataaggtttgtagtaacaaaattatagccatatgaaagtaaattcaaatgtcaatccgattatacaatttttagcaagtaaaattcgattcatattgtactaaatgttggtcaaaatgttttgaatgtggaatcttgaaatgcgtgggtgccttatattatgggatggagggagtactcttttatgatatcctttcttttactagtcttgattagagtcacttattttaaaattaaccataaagggcaactcaagatacatcggccaaatggctgatatacacttaacagtgagtgttatggtcccaatttaggacctttacttttacagaagtaggttttgcacacaaaccagttcactcaaaagcacttttgatatcatgtttttaattaatacatatgtcatctttcgtatgttcatcatagaatgtattccctccattccatattgatcatcacataagtattttcatcaagaccaagagaagcattaacttccttgtatttcatttaatgtgagtatatgatgggagaaaatcaagaaacatgcagactttaacttcccccatacacaagaaacaggaactttaccacccccaaatgcctgtatgcaaactcaatttgcatgcataaatacaataataatactacacgtcaaacgaaagggtcagggttatatgatgatcaatttggaatttctgttttttggttacatcatgatcaatatggaacggaaggagtactacataagaatttcatgctaataaaattagaaaaaaaaaacagattcataagacagcaacgcaattttcttggcagagagaagactatgggatttcaatgttttcagtttataagggacaaatctgatataacagatacggcaataaacaatttcagtgtttaaacaaggaaatttataacagttgacacaaacgtgacattttcagtctattaatacatagtagaaggaaggcaaatctttaaacaaggaacaaaaaggatgcttcttattactagtgttcaatatactggtctattcttagagcatatatatgtaactggtgcccccttcctgttggcatacataggttagatcacacaatcttccattgccggttatgcataatcaaataatcaatactaggggggcaaccacatgagtatcacttactcacttagctttttttcaaaccttgcttattgaagtgaaaagaacaatgttcagaaagtcagtatcacttacttaaatcttggggagtaactacaagaaaaatgagaacataatagcacatagtgatggtgagacgtactcacttatccaaagcagcatagtatcggtccaagtccttgtttgccatctcagttgtctgcagtcacatcagctattagatcaagcaacaagatcaaaaaccaaagaaaatgaacctggacattcatgccatcaacctttagttgaagaagttggttaaagtatcgcttctcaatatccttgtactgcgtctgtttaagttcaagcttgtgttttgaaatattactttgataaacggactgcgttccttgacacctattatactgcataagttgccaaaaagaattagggtgatcacaatcttctgagtaaaatttccttttaaattcattactggaacatgtgaacatgacattaagaaatacatacattgccatacgtattgtatgttaatgattacagaaacagagcataaaagaacgccatcttattagatgcaactgtcagttgtttcaaatgagatataaaatacctctgaaagaagcctatctttttcttgtgaatgttgcttaagatccgcttctatagtagacaggctgccaatggaaagtattttgtcctcaagtaattctatttcatgagtaagtcgttccacttcatcctttgttctcctgtagttaaggttgtcatcaatgtttcttttcaactgatcttggctcttcaatagctctttgttcttgcttaactccgccgatttttcttcttttctttccttacttttctgtagatcagactgcaactgagtatgtttttcctgtagttcattaagcttctcgcccttctttgaattcaggtacctaaaaggattcaggagtaaacatagatagtagaagttggacaaactaaaattcaggagcaatatgagttttataccctttgatacgctcattgtgtgtctcgagtgcatcaatttcctgctggaattccctttttctttctgccagctgatgatactcctgatcaagcttttccttcaaagcttcatgctcttgcaacaagctttctctctcttttgacaacggaccaagagactcctctaaatgctgcataattgagcaataaccgattatacacatgttgcatcatagtgcataagcccaagtgtaagcatgtcattgataaaaaaagcacccccaacatttccgggactcgaaacaatagcaagccaagtgaaccacaagcgtttcctggaaagaggctgatgcaagtgctgactaaattgtggtacaatgataaccagccagtaaaattctcagttacatttcatccaaaatcactgtagtatttacatacgagtttatcaaattgatcaaatgctcttaaggctataaactagaaggactgcatcatagcagcaactttgtggcttgcccagataacatataactccagtaaactatatgtaaatatgttatatcatccaaccaaaatgggcatatatctgaaaagcatgaaccttggaattgaggtattacaacaaataaataggagtatattttattaaactctccctattattattatggtccaagttacacaaaaccacagggattttgtcatgtgacacataaccctaggttttatggtccaaaagtttcacaaaaacacccaattgatcattgacttttgaattctacaatcacatctcaaatttatgaggattttgttcagcatataaatgttacatccattttttaaaattttgatacaagagtatgttaaaatggttaacagtgtggttttgtgaaactttaggaccataatatccagggttacttgccacatgtcaaaatatctgtggttttgtgtaacttggaccataataggtggggttttatgaaatttactcaagaaaaaattgtgcacagaaggcaagcaggagtaccttctcttctaatgttagtttttctttctcctcagctagatgtcccaaatcctcttcagctttttgaaatttgtgcactgcacctgaagcttttagcttctcttccctaatatcatgccatcgcatctgagcattagtcagaccatcggtaagtgttctttgttgatcccttagatcatccacttcattgttcaatgtgtccctgttcaatagataagagtatcaaacaaagtgaagcttccagcttccaagtggagtcgtgaagaaaataaagaggtcaaataaactgcttaaaagatggtaatagaaaatatattatatatagtagtatctcaacatagttacagcatattgaaagccaaagcacctaaagatctccaataaccagtttgtgcgcttatttctatcagtaccaagtgaaaaagggaactctacaactagtatgtgacagatagctgtctcagagcagaaaagcgctgtctatgagcagaaaagtctggatgggtgcatccttcactaaagcattatttggtactcccacaaattaagggcatcagttagctctgtaagcatttaatttgattgccatagctagagcagtgtatgtgacatatcgaccctgaaaagcttaagcactagaatttttcaagaccccaataactgatcatgcataaaatatcctgttgattaattccttcgagaactcttttctaaatttccgaacagatcaacagagtataaattttttaggccatttgttccatggttccaaattacccttaacaaatttgctccgttctgagaattaaataccttgtcctctgcacagagttcaactccaactggatttgctccaaagatttaacaccttggccacgaacatcaagcttatattcaagattttcaacttgtggtcctaactgctgtatttcttgtacgtgcctatcaatcgtttcaactggctgtagcaatacctgcactgcatccttgtccattttaacttgagcaagaacactgacaaactgcaatgaaggatcacatatggaaactgtaaacaaaactacatctctccaaagatcaaagccatcaaaatgcaaacaagacaaagcgaaataggttatacataataaattatcttcgtcaataacaatattatctgcataggtaactaattgaaagaaagttatgatttcacatgagaccacagatatactatgattaaaatattttctcaaaggtaagtacttatttaaatacaagactatgacatgagctaaccacaaactacatgtgttttatagatttcattgagagactccatcctacagtgcccaatcaagaagagcttaagaacaccaaaacaagccttatgccaatgtggcctagaagaggtggcaacacataactacagaccatctaaacaagatatgctctctccgtccacaaatataaaggattttggctacgtaactgaacgagtgcttgtccaggtatataaccaaatcatttatatttgtggacagagggagtagcatgctgtaggctagtcgcaattagtatgagatcaactccttgttttaaagaaattaaatatactgatttagtactgcacgaggtggcaagggatgatataattgtgcccgagttgggcacgaggaacgaaatacaagctcaaggatattcagtttggattgaaccagagaagtcaagttcatttaagtcatgaggttatactgtctgctatttcttttatgtctgggaactaaaacagagttgtgtgttaataacaggaaactaacatcatcaaatgtttgtgccttctcactttcatccgccaaaagttgtttcaagttcttctctgctagaggtatagcctcttttcccagcttcacaaattcctcataagttgcattgagtttattcaattgctggaaaaagtcttcagcatttgagcattccaatgagatcttgttcatgcgatctgcagtactttcacacgttgtcctttgctgaaaggtacaacagacacattaggaaaaactcatatgaataaagtaactctaacaaagtaaaaggcagcatgttatatcaattattagatcaggcaccttctttacaaattcatcctcttcatcaggtgtgaaagcacgttgacagcaagggcacatgtggagctcacgagccaaattttcaaaaggctcatacatttgccgcattcccttcgcgtaacttaaattgctgcatataagcaggaagcattgaatttagcacatcacaaggagatatatagaccaaattaaatggctaaaattatggatatcaactttttttgtttctctctttcatccatggcatctttcagatgtttgggaaacatgttaatgtcagcagacatcttcgtaatggattgaagtttggactccacatagcttctctttgctgtagaaaaacatgtgtcaatggatcttatcacagtcttaaaagataaaacgaatgagcagtcctttcattagttccatagaaaaactttattaatttccatgacaatatttgtattctctttacagtatgagaaaacattaatttattatcatctctgagagaaccttggaagatgatataggtacagtgtgctaaatttctgcccagacaaaacaatcaaattagttcttgtcatcaaattgagaagaaatttacccatgattcaggtgaagcatagatcagaactagtcccagctttattcaacgaactatgatgagtctaaaggacaatttggctttgaacatgatggcaattaaaagagtaaattagacaggtatgaccaaccaaattccgccgcactaacataggagtactaaagaatgaggcacggcagctaccagatgcttggacaccttccacaaaggcgctatgtacaacaacaatatttcctcaatgcatgagttatctcctacttccttcgtttcacaatgtaaaactttctagcattgcctatattcatttagatgttaatgaatctagacatatgcatgtgtttagattcattaacatctatatgtatgtgggcaatgctagaaagtcctacattgtgaaacggagggagtacaaggcaatgtcccagcaaggctaatcacatgaactacctgccaatttggctatccaatcaaaaatgcaaccaaacaaatcaatctcatttggggtcaaaggcagttacttaaagaaacattcagtgagcacaaacagctaaagaagagagagcgagtacatagcatgaactgcatccaccgatctgtggaaggaacacctagacacccagtttgatccgacatgcaattaattagacgattagagcgagctaagtgctgcatagaccagtattgccttgtctggcatcatggtagcagcaaggaagcagaccacataatcagggagcaatcatgcacaatggggacaccatggcctagctcgctagtactagctgcagctgcaactacagtactgcagctatactgccacagctagctatgccaagtgttaagaggagagaccaagggagagaagaatctgatactatctcacctcaatggaggccaagagctgcaaaaatgatgtgaatcctaacagcgattgcatttcacatgtttgcatggtcacaggtgttatgtggagggatgaattggggtgctcaacgggaaggcgaggctgcaggcctcgccgccccagagcttgggtaaggtcaaacagagaagaggggagactagagataggtttaacttctttcttaattaattccacatgactgtggtgcctctccttacatagagccagctcctaacaaacatcctaacaaaaggcctaacaaacctcctacaaccttatctaataatgagaggggctgagttctgcccataacatctccatccctccttcgagacagctcgtcctcgagctgcggtggaagccatgcctaaaggttgaggggtgccgatcacccatgtcatcctagtcccctttccctcctccttcggaagcagctcgcccgcgagctgcaagcttgtcttcacatgatgtcctattattaagccttttacatctcggctcctaacattatttggaaagaataaatctaaaattattttggtgttccatgccattcttctgctgccaagctcaggtgggccccatccagaagaacatagaggaaggacgccataccaatgtgactgtgtgttccaaaaaccacaaatgtcctgcttgctgtcatgtttgccaaaggagaccaaagctgtgtggtgcctagacaactgcagcccactccaatagcccctggcccaagacatgttgtatggatcttgtcttctcaacagaggatcacgtgaccagccaaaaagacacggtccagttgacccaccgaacagcagggacgaacgaggaaccgttcccatatctcacgccgccaccagaagtcacatctcttgcgccgtgcatgccgcaatcactgcatgaggacgcgccgtaccggctatgcgcaccagccgcatgtgagaagggctgacgccgtggggtcgcgaggaaccagctgcctcctgcgccgactctcgtggcacacctgctgctcatgtagacggcgccacccccaggaggttgacacgcgtgttgctcacgctgtgctgcagcagctgcgccccctttcccggcgcgcgtggcccgcctggatcccacgccgttggcgccgcacgtgatgctccccgtcgtcgagcaacgctcagcgtaatcgcagccgccgctcgaggaagctgctggaagatccctcgctgctgctgtggtcgcagaagggaacggtgacgacgcgacacgatggtcttccatggcgatggctgagttgatggtgccccagcgagcgccgaccggactgttgtgaggtgtgacagcactgccgcagcctcggatgcgaacgacaactgagaaaatggcactacagccaggggctgcagcacctccgccgattggaccgatggcggtgaagagggcatcgtcatcaccggttcctccaccgcagccgcgaacagggacgatggcagagaaggcggtgccgtcgcgagtggcggagagggcgtcgtcgtcgtagtttccaacgccacccccttggcctcaaaacccgcacggagtgccaacaccaattctgtcaccttgtcgagcccagctgtgatctccgtgatggaggtctgcatggccctggaggattggcgcagcatgtggaggtcatggatggcaggcatggtgaatggcgtggtggggtggatgttatgtggaggaatgaattggggtgctcaacgggaaggcgaggcctgcagccttgccgccccagagtttgggtgaggtcgaacagagaagaggggagactagagataggtttaacttctttcttgattaattccacatgactggtgcctctccttatatagagccggctcctaacaaacatcctaacaaccttatctaataaaacctaacaaacctcctacagccttatctaataaagcctaacaaccttatctaataatgagaggggctgagttctgcccataacaacaggccaatctgatcaaaagtaatctaactccgttagtttatgattgtaacatcctaagttccactaattaaatttatcagtatttttcacatattttcctttatttggataggaatgtgctaggttagcctaaagataaaaaaataaatatcaaatgcatgcaatatacatagttcgtaggaaatccgccattgtttaaaaatagcaatgagaaaaatatggtacatttgcacttgaaaattcaaggagacgtataaccgactcctctccaaagttatttgttcaaatcccacaccatagtggatcttttagatatcaaaatatttcacataaaatcacgccattacgtaagtataaatgtacggtagtaatatctgaatttaccatccaattccttttgaagctttgacaagtggctcctagcatcaagtattttcatctgtaccagtttcagctcttgcgctgcttcctgggattttgagttcaaatcattgtattctctgtctacagacctgagccaagcagagttttgtaccattactaaatgcataaataacaactagaggacttcatatgtattattctcacatctactattaggatgaattggcataaacatgatagttcgtgtgcacaggactaatcatcccagcattaatgaacagccatatacatacaactacacggttatgtttaaaattatcatgtacgctactgcacttgcattgaatgtacatcagctcatggtgtgcatgattgatcaaaatatgcatgactacagatagtcagatactgctattactactactagctatcagtagcccactgataaaaatgcagaaatgaggtcaattgatggaagagataactttttcaaactacagcttgacaaatgacacaggtgaactgaactgatcacagcaaccaacaaaggaatcactgatcgctggttgaaacaaatataagaaaaacagagtagcacatacccaaaggcttgactaagttccttcttgacttccttctcagaaggagtcctccctttaaacacaattctgattttgtccttatgctcatcaaatctgcattttacacagtatgtgctacttgaacttctcacacagcaagatttaagattgggaaatataaaaaagtgaatcataaaataagtagggttataaaaggagagaggaagaaacatgcatctttttaagtttcttcttgctttcttccaattcatccttcttcacgtctagtagtaccctgtcattggaatcactaataatgctgtctttttcccactgaagtgtttttatcttctggtccaagctaaatatctctgtgcgcttctgatttacaattgaatcatagttcctttctcccagcgcaagtgctttcctttcaacttcaatttgctatccaaaattaagatgggatgaatcagttattattctcaaaaaaaatactttcatcagaattaagaatgatggcatactttaagacatcaaagcatgtggagaaaaatatgagccaacgcctaagggtgcaatgctcaaactgtctaatgctgtgagcctgtgacatttatttctacttctgataaaaatgtaacaagaaaagtgcagccacatatatggatgtttccaagaactaaagataattggatcaggaaagtaccagatgtctctccttttcatcaatacggggaagattgtactttgaaaggtccatttccgcggcatcgcgttcactctctttatctttcatgcgccttgaaatacctttctgaaaagttattgatatgtgaagaaatacaatttcttctgagatagttgcagaagatcatatttgtgcttgtccaatgttctttccatgactaaccttggaggcaaccttagattctatctggccaacaacttcagagtagcgagtatttacttcaagatagcgtccccacagaaactgtttctgtgcctcattagatttctggtcataaagcggaattttcattgtcagagcacatactttttaagaacaggtgggttcaatattaactagataaaattcactgcctacttgagcaaatgatttgagtagattcagtaacattcttcctccaacaaaaactgtttaatacataactcatacgtccactgagatgccacaccaaaacaggacaattatgaggtggatgcagaatagagcacatttgctatatgactaaactccatacgcatattgattttggaaatgattttgaagcttataatcagcggaagttaaaaataaaagtgtatactttagcaattaaattccagaatacatagaatcagtattctcaccttcttatcctgcaaatcatcattaagatttgacagttttgctttagttatgtttgtaaggtgcatggcagcagcatcagttaaaggagcatcaggtattggcccaagattatgtttggtgaagatctttctgattgctgaatcccgttcgtgtttcactgacatgtgagcctgaaaaccacatatttggatgttactttaaacttttaacgccataaaacaatgtccactatagttaataatgactgataaaatcataaaaagaagatataaaagatgataacattacgtcagcttctgcctggagccttcctgtttctcgcatcaaatcatttatggccttggaaaggaaggagcttgttgtattttcatcatccacatctctttctagtttactgatcttattttgcagcaatgccattctttcttcaaatttcgtttgccactcctttagttcatcatcggtatctaaacaaagacagagtcaattgttgtaatggtgagaactaatgggctgaagcctgaaggcacagtgacacaccaaggagtcacttaccttcgttttcctcagaaagagcagcatactgttgctgctgaagtgtaaaatatgtagttctagcagatgtactggagttaatttcctgttgaagcctcctcaagtcagctaaacttttttcagtacgacgaattttgtcttcaacaccttgaacgtttgttctcagttcctccatttgaatttttaaggcatctgacttctcttgatcttgagcaatattgtcacggagctgtcaaaattagtgagagttaaagtaaaaataaaaggtacgttagtgagacatgtgggtcatggacaattactctatcccttatatagcactcattgtctcgctgacatgtgggtcaaggacacaattgttagtgagacataagtagcatataataatagattaagaaataatttcagggtctacggatgtcaggtgaacatgcaaaagctggttctcacaactttgaatggcacatagaaacaataactagtatctaacttgatgtatatactccctccatccccaaatacaagggattctaggttatttgaggtaaattaattatagagaaaaaagacaaaatgcctcccattaaataaggatatgtatggagtgggggagtggttcgtagtaagatggggagaagtttgaatgggaggtgattgatgtgaaaagtaataccaaatgtgttacaatggtgtctgctgtcaaattacttcattaattgccaaatatttacattgtttctgcattcttcaccaataacatcattaaagtcagcaggacaccatgttgataaatcagacatcttatgacaaataattaaaggtaaaatatgctgattagccatatattctggcacaaatgcaggacagaacgatacaatcccttcaatttcttttagttgatcagtaatcatttaaaaaaaaagaaaaacattgtagcatttcaaagatccagaacaaaatgatagcccaacccatggcaaataagcaaataacaaaggtgcttccgcaatgacaagttgaactcaactctcgataccataactcaaaagtttcatacaatggcagtctagcaggaatgattgaacagaagattagagtaccctatatgcttggtcttttagagtctgaaggttctccaactttaacctaaaagtcttgatttcctgtgcttgatccttgtgaagtttttttatgacttcgagagctttggtatagctgcacatgcaatacagaaattaaggtagtccaatgctagtcataacgacatttcaaggaataacgatgattactctagagaataatttatctcaaaatattgtcatgtttcaactaataacggttatgctcttgaccagagcttccgaagcaaacacgaaatagtaaaacattcaagtaccgggtcgcagaaaagatatcgtcaaacttcttcttaagtgtcgatggatcctgcaaaggccaattggactcatcttggtgcacgaatataacattctccagtatagcctttgatacacccattaaagctggaatctccctatccatatcagcacatctgtagctgaggcagactttctgaattcagcaataacaaaaacaaattaggctgtgaatatacattgtaacctaaaatgttcaacagatacagtactcctttaggcgcaatttgtggtggctgtgctgtattatactgtgcttattttaaatttgtagtagaaatgtaagaatcattctattttaaaaaaaatcaaataatggttagaaaaatatgttatgcaatcatcgtatctctcacaattgtttcatttttatagaacacaataatattatcgcttccaacttagattgaataagaacagtttaccaaacgagatttatcataatccacctcaaccccaaatgaagccatagtgatacaaacccgttgccttgtttaaatttattatttagaaccaaccaaacaagtgtgaaattcccatcatctagattcacatggatcaaatttttatgtgcaacaatgtcacactaagtacctgtggtcacagaaagtacaaggtgtcctaagaaaattttctacgaccacaaaaatagatcaaaaatgaaagaaatcaaatgtatttgagaagtgttgcatggttcataagggcaatctgattgttctattaattaaaatatcaatcggtatgcaatacaaagggaaattgagagaaaatttcccacataactatgcacttccggctattctagtttatgaaaacatttataaccaccacagactcatagctaagatctacttaactcaaatttgagacaagggtttacctgacacggacaatacaaagtgcaaggaaaataatggacgtctttgtatgcaaccatggggacagtatttactacaagaaagtcctacaggcagagacatgtatagcaacagaaactacagcatatgattgatatatgtaataatattagctttgtaatgaaccttgagttacaaacaacaatagacatgagaaatcattttcgggttacaggtgttctgaaccaaatcaagatcatccaatgacatgctggcaaagttatttttcccagttggagtttcaagaatcttttgtaactaaacaaacacacccatgcctcaatataatcaaataaataaatctcaaaggcatggccccatattaaacaacttggaagcaaaaggggaaacaataagtctgaggacctcgcccgtgtgtggatttatagtctggaggacgctctcaattgctttaaactccatttttgatgccttctgggtaagctggaaggagcggatgcacaccacatcctttcctgctgctgtcttaaaccgcagcttaatctgcccttttgtttccgtctcacctgccacctgcacatcccacagaaacaagtaatgtaaaagaactcctggcagaaaattatgccaacaaccttgaagcagcttcagtccacaataaccatcattcatttcaagcccattccctggcacaatagcacagcacactgcacctccataggcattcgagatccctcaattgcatcaatccatcgctccaccaagatacaaatcataaaagcatcaacccctgttcgatacgactgctatcaaaccaccgtgaactgggtacccccaatagaccttactaacaagattaatcacaccattgttcccgaaatgcagcaaaacccctacgactcaaccccgagcccatggtgaggacgaacactgaagccgcgcgtgtgtctcaccttggggtcgtgcacgaaggtgtggccggagcgggagttcgggggcagctcgccggtgcaggagagcttcaggcactcgatgatcgtctgcagggaggacagaaaccaagcaaaaaaacccaaaaaataaaaatcagtacacgcgcacactacagatgctaggggaaagagattggattggggcgctcacggttttgccggcgccgttggggccaacgatgagggtgaggggcttgaagaaggtgatgacgttcttgttctccggatcgaagctccggatccccttgatcagcatcttgtccaccgtgctcatcttgccctccccctactcctcctgctgctgaccagccccctcgcaatctagattggaatcgccgcctcctcctcctcctcctcctccgggagtggaaacttggaatcggcgatcgcgttgttgctgcgagcgattgattctattcccaatccatctgttgctcttgctcttgctccgccatggatggaatgggagaggggcggaggaggaaacgttggggagaagggacggaaaaggtggaaagagtggcgtcgcttcctctggttttgggtttagggttttacacttccatctctctttttttttagaatttttttttaaacgaatgtagcggtgttaaatttggaagctaaaacacgaaaaaactagaaaatgattgcttttagcaccccaccttcatttaagtcccaacacaatactaacaccctaacatatttttcactcactactagaaacatggttgtattagggtgctcatgatgcgccgattgtcgtttggcccaagtgctaggaaccaggtatttgtcgccatctcttcaagccgcggagccccatgaagaccgcgtaaccgaaattggtcacatattgttcaagctgaacaaggatgtgcagagcaagaagaggagcgtggcaccacgttgtggaggtcggagcttcgtcgaatcgtggttttgcccatgcaaagcaagcgtttccccaatagcccctcccgtgcaccaggtttcccccctcctgcgccgctttgctcgtcaccatcagggagggggagattgcttgtacggagattcaccgtcgctcaatcacaaccattccacaaatcacaagcaatggtgtagccatgggaaaaatgcatgaagtggcacatgaggggagggaactgaatacagcttatcttgaccttcctgtggataaccttatcgatgctgttattggtggagagctccgatagcttcccctccaccgtcgtgatgttgccgcctactatggaggtggagcaatcgagaaggataagaggaggatccagagggaatggcgatgatggcgtagaggaaaagagagagaaggggaagcaggtcatggctctcgtgccgtacccgcgcctcttggactccaactctatccactcccttagtcttactgccgcggtgactagcaactagcacagcggctcctgccccaacggcgatgagcgatgtgggcggaggaagtggagaaaacttgatgagaagcgtggtaggaagcggaaaagacttaatgagaagcggggtagttgggggaatttgatccaatttgttgttgaccctttgactgggacaccaccgttgtaggctaagttccttttgagagtattttgatatttgtttgggttctatttaagttcattttaagaggattttgatatttgtttgggtcctatttaagaccacatgcagtgtggagcctattttctacaatggttctagatcaaactactgtcttgggtctctcgaatacgtagcctgcattgtgaatgcacttagggtgagtttgaggaggaggagattgagaagattgggaagatgcgcaaaacaaggtgagccattagcgcatgattaattaagtattaactattttaaatttaaaaatagattaatatgattttttaaagcaactttcctatagaaaatttttacaaaaaatacaccgtttagtagtttgggaagcgtgcgctcagaaatcgaaacaaactcactcactttcttcagctgccgaacgcaacattagtatcaatattggtcaaaggagcatgttttgtgaaagaaaaattaaacaaaactaataagacagcatcatataggatttgatttttttttaatgttcaccaatgcatgctatttttttgaaataatggttcacaataatgatacttaggttaatttatttgttaccttagtatcttccatcacttttctaatagcatggaggtatatgatttctttttctccaaccatggtcattaaaatcgcgacctgaatccgaatccgaggttgtagttaggattagaaacatagaatcgtaattctacttatataaaattataaaaacaagcaccttaatcaggattataaagtcgtataatagatacaagattttgataaccttatcttcaactcctccttagagcccattgatgctcgttcttttatgtgagtaggttttttcaccaaactaatgagtagataaacctactttgtactaaaccatccatgagtcttttttttaagaaaacaatagaacacctgtcttaaaatatttcccttttacagaaaaccatgcttatgacctcatggaacctaggattaggaagcctgacttagaggagacgaggtagcaagttaaatggtaggcaaagttgatgagatgaacggaggtgcagagtgaagacattacatggtgacatggtgtccaatcattcatccgctgggctttgcttagatcccaaaattcctagtatctaccttggcacctgccaaagagatctcatttagacagtagtaattcataaaacaaaagctatgatcggaattactaccttggcaccttcaaatcagacctcgaaccagtatcttctaatcgaccatttcatttagatagcttgcaccctccaaacagagaaccaatatcttctaatcaactcgatagactgtcaacgactgcatatttacttggttcgctaccagtcctccagcaaaattgcaatcgagggaatagcagtgccaacaagaccaaagcgcacagggtaaattcctcgaaaattaaataaaccagtatcaaactagtatcaataagagtgtccttcgcctcaagacatcacaagaacaagacaaaatctctcctaattactactttaccagctactctagagtctaaactatcaattatttcagcagttcgtagtaactataaaatcaaattttcagcagttcgtagtaactataaaatcaaatggacacaacaaatgaatgctccaaacttaaacgggacaaaattaacacaaaaagaaaaaaaataacacatcagctgatcatcaaagaccaagctaagactacatgtgaataggtgtatattctacaattagcaaccaatttaaccccttttgccgccttcaaaaatagaacctcataatttgtaaattgggcttgacaattccagcatgcaatcaattgatgaagcctatgttgaatctggacattccaaggaccatggaatgataatactagagacacaagctacttcgcccctcattttgcaggggcaccagggcctgctgatgtacggccaccacgaccaccgtcaaccctctggtagccaacatcaggtccacgcgcagagccacctctgccaccacctctgccaccataatcagatctgtaactgaaatcaccccttccgtagctccttcctccactataattgccacggcctctcatcccgtcagctctgaagttgttattacctcttcctggtgcaaaccttcctcctctgctggatcctgaggcaacgtatcagtaagatgagaacttggaacaagttgagctcatatatagtggaaataattcttcaggtgccaacattctaactaccattatatgaggtttgctagacagctagatatagagtgttgagatccctcaaaaatgactttgcagtccatttgaagaactcacaaaatgtgcagtcacgcttctcatgacaacataaattagcccatccaacatgtcctatgattaagaagacattccaatgataatttccaactatgatgactttctcctttttctatttattcattttattttctttttctttcaattactactgcagaccattattccattactactggtgtttagactagtcagacatttaagtatgctccaatgctacacttacaataactcgaaaaaagaaataaacatgtagtgttctgttacactgacctcgtgaaccaggtgttctcttctcctcgacaaaacattggcgtccaccaatcattacaggagaagcctgtgtgaagttaaaaacaattagaatttgatgcatgtatataatactcagtgaccaagtaaaaaaaggtaaaccacatcaaagtcaccacacaatgatactggcaacagagcatgactgcacataacaagtgatatcctttgttgaagggttaaggaaacttgaaagcaaatcatggaagcaattgaattgatatgattagctcaacctgaacaatacaaactcagagtaggatccagacaacatcgggaactgagaacaaaattacagaattcacaacaaataattctgatccattgggtggaatgcagtggaaacattatgtaacgtagagcaatatctacgaagctaacaatgacaataactataatgttgggattgacaatacaccaaaactttggttcagctctccaaaaatggaattcatttgccacaacacatgaaaacattttttttaaaaaaaatgctcaccagttctttggaaagagaagatcccacacatccctaattacacctggattattaatctagtaaagaaatatgaaaaaaactccaataaaaatataaattaagggttccaaataaatgattttaagttaaaaataactgttatcccacaaatcacaattaaccattcattagccaaaataagcaattttatctccttaattggatattcagaataattccagcaatttctcaaaaagttagcagatgggattctaaaatagttttagccacagcaatattttccagttgttcccaaggttccaaaagctggccagaaactggtccagaaccagggggtgattggttactggctggatggctgtgattcaaactcatacataaaattttaaatttagaaattttctggccagcacttgaacttttgtctggtatatacagtacagatttcaccagggaccgataattccagacaaagcagtatttggaaccttggttacaatgggagcaacagatggagagtttttttacatgtgtatgtgaaaggtagccatttcacacgcactctcctacctgctgagttaatattatgtttaatacttaaacagcccaatgtgttgtagtgatagccagacctatagtttctcagggaaagatccaatattttacgttgtcatgcaggcatatacaaaaatttgcccatatctaagctcttcaatgaccagtgcttcatggttcagaccagttgtggaacaaaaaaaaaagaatggtttttttcagaacagcgtaaagataaatggtgtccactcaacaacaaaaaaacaagttactcaaaattagagaagatatgatatgtaatgcagtcatcaccagataatgtcaagcaacaagagctgttggtagctaaagaaaagcacgcagtgataatgaactaacaatgctcacagtattggatcaaaattagtgtgtgatgaacaaattgatactatcaccaaacaacctgacaaaatggaatgatcaaaactaagaaagactacctctatagcactttggactgcagtagcttcctcgaattcaacaaagccataacagaacccttgaatctgcatttacattggaaaatattgacaacactttcagagacagaataacatagatagttttccaaagtccagaggaaggggaaaaaaacaagtaccttatggcttctgacttgaatcccatcaggttttatggtgccaaacttcttgaactcatcctccagttgtgtcgtagtggcatttaatggtagactcctcacgtatatcgcatgtgcatcaacttcaaaataaagaccaaagttcagagaagctaacagaattgacatatctagagtattgatcaaagcataggattgtagaaaataccttctggctcatgcgtattgctgctctcagcattagaactaaaaggagtagcatctgcaactggagcaggagccggaggggcaggagattgcttctcgggtttgggaggtgcaggtctagcagcaggtgcaggcctagtagcaggaataggggctggcactggagcttctttcatgactttgacctgcagcacaggaaaaaatacgataccattaacaaagaatgcagaacaaaaatttgatttgagcaatggttcaatccaatcacctgctaccaaacaagatgacaaccatcatggccaacagtaaaaagctactcaaattatttgaaagctgtcactaatatttatttgaagcactacacttaaaaaagcacaataatttttcaactttagcactgcctcttcctggtcaaccatcaatagattaatgctcccagattgtgcgacatcaagacaaaacattataatgcacaaaatcagtctagatctagtgtatggatgacatcacataaaaacttgtcaataagaagcacctcataagactacagaatatttagtgcagtggtacgctaagctactactccctccgggttgataatacttgtcgttttggacaagggcacggtcttcaaaaaacaactttgacaattatttttcattataatatgtataaaattgttagcaaatatatgatcttattaaagtactttttaagactaatctatacatgtagtcaccatatttgaaagataaatattttaaaaatgattcataatcaaatattctaaagtttgacttcacccttgtccaaaacgacaagtattatcagcccggagggagtaaaagtttgtgcataactacacatttggagtggagtagcttacagagtagcagtgtgcatttcacaattgcaaatcatatggaataaaacagttaaaacaccattcatgattagatataaatttataagcaaaatacagctcgaaatttgagaaagttgcttttgtgaaacctacaattgaggcatatgacttctttggcgcctcctcgtgtgacaccggagcatctgcaggagctacaacgggcaccacattatttgggacttcattaatcacctcaggaactgattgttcctcttccacagccccaccctccacctcctccagaggcggattataaacctcctcctcctcctcaggaggcaccgccacattctccacaacatccggctcctcgtgcggcatagcatctacaaaacgggggaaaacaaatcgatatcacaatctaattcccccaaaaagctatatagagtttaagggtttcaccaaacacaccatagtcaggagcagcaggctgcagaggagcagtagctgtaccattagccaggggtggagccacggcatctgcctcgggctgcacctccgcagcagcagcagcagcaggggtagggccgtccccgacgtagcggaacatgtcgttgagcacaaagtagcccttctcctgcggcgccaggaagaaggactgggagaattcacggcacacgccgtcgcggacggtgaggtggccggtgacaagcacggtgacgccgccgccgagcgactcctgcgaatccaccgtcttgatctccgcccgcgacatgtccatggccatgatcttctcgttgatcgcctgcggaaccacaccaaaaacccccccatcttcgtgtcaccatcccaaccagaaaattaaaaaaaaatcgtcagaaatggaggcctccgcctcgcggcggcgccagatctggaggcggcgggggctgacctccatggtggtgacggagaccatgtcgccgtagcggtcggcgggcgggcggccgaggcggctggcgtcctggtagaaccggtacaccagatccggcgactggtgcaggatctggtagtactgctgcacgaacgcgttgcccacctgcagagagagcacccagtcccccccgccattgcagatcagcacggaaccacggcgagaaaaacccccctccaaatctcgcaaccacagagagacaggggaccgaagcagcttaccacttgcgcggagggcgacggggaagcctgcggcgcggccatggggggagtaggaggaggaggagaggcgcgcgctgggctagggtttagggccgcggcggctcacccagtgagttggtggcggtggcggcggcgccctggggtcttgtggcggaacagtagagaggagagggtgtgttgtgttgtgagtgaggggggttatacgtacggctccggatctggagccccgcggccgcggcgcgacgcggcactatgcggtgcggtgtggcggattgattcgcccctcgccctcgagcttgaattctggctggctccaccaccaccagggcacggcacacaccacgcacgcgtacgctgcgctgcgatgcgacgcgaacggggacggccgccagctgctctccgcggaatttttggccttggagccccgttttgagcggcgttttgggccttcgagccccgttgagtcggaaggttcagtacgcggaataagtccaccggagatccctcaaacttaacagcgagattttttttcgacgtcccttaaccgcaaaaccagaaatcttcactcttaaactgtacaaaaccgtccaatttagatcccattacagtatagatgcctggtttcgctgacgtgacgttcgagtcagcaaaataaaataaataaacatgtggagcccacatgtaagtgagacaaaatgatgtgggccccatatctcatctttcttttatttttctcttcacttctctcctctcctttccttgcttctctcgagcaggcgcggcggccggcgcatcaagcacgcgcggaagaagggggagagaaggcagacaacgcgatggcgccggcgggagaggggcaggcgcggcggacggcgcagcgagaccgcgggggagaaaggggagaggagatggaaggcgatggcgccggcgggagaggggcaggcgcggcggatggcacagcgagcccacggcggagaagggagagatgaggcggacggtgatggcgccggcaagagaggggtaggcgcggcggatggcgcagcgagcccgcaggggaagaaggaggagaggaggcggacgacgcaatggtgccggcaggagagggggagaaaggaggccgcgcccgcgccgcctgcctctcccgccatcacgagctgtcgcgcctgcgccgcccgcctctccggccgtcgcgtcgaccgcctctccacccctctcccgccggcgccatcgcgtcggccgcctcctctccccctctcccgccgtcatgagcggtagcgcctttctccccatctcccgccggagcgagcggtagcgccgggcgccggccgcctctctccccctctccgcgccgcctggcggatgggacagcgcactcgctccgtgccgcccgcctctctcgtcgtcaggagtggtcgcgccggccgcctctctccccctctctgcgctgcccacgccgcccagcagatgggtcggcgtgcccgctccatgcccacgctacccgcctctctcgccgtcgcgtgcggttgcgctggccgcttctctccccccgtcctgccggtgccgtcgcgtggccgtctctctccccttgcccgctccactgtcgcaccagctcaagagaagtgagggaaggagaaaagataagagaaggaaaagaaagaggagatatggggcccacatcatttcctctcacttacatgtgggccccacattattattattattattattattattattattattattattattattattattattattatttgcttactagggtgccacgtcagtgaaaccaggcatctctactgccatgggacctgaattggatggttttgtatagtttagggatgaagatttctggttttacggttaagggacgtcaaaaaatctcgctgttaagttgagggacctccagtgaacttattccttagtacaccgtatgtggacgccgtaagctccggcttttctgtttccttcggtaggttaaagtatctcaacttggtaggatacttatggtgaaatcaatttacccagatttaagtcttagacataacgttttttatttacagctaattctaaaataataggtgatgtacccatagtcagctcataaggtgtgcttgtcaacgtgtgtgccttcaaaaggctactatgtttctaaaaaaaatgttcatttttcacctatcccgcatacaccaatacaaaatcaaaaagactcgaataccctactttattaaatccctaccctactttattaaatcccaagataattattcctcatattatctatcccaaatacaattattttctacttttataaatctcaatgcaatgattacaaaaatgaacttattatgggacaagtgaaaggtgtgcatgtgttcacaaggctactgtgtttcttaagaaaaagtttatttttcacatatcataccaatacaaaatcaaaatgacttgaatacccctattttattaaatctcaagataattattcctcattttatctactctcatatagttattttctatttttacaaattttaatgtaatgattataaaaaatgaacttattacgggacaagtgataggtgtgctgtgttcacaagactacagtatatgatgggaaaattaacccttctagatgatgagaggagtatatatagttttatatattaaatagtgttaaaaaaactttaagagtaaatttcataaagctacatatactttgacaaaaactatatatttaaggtattttaacacaaaaatatatattagcgtcaaatttaaaactacagatttaaaatgaagtatcacaaaactatatattaagtagcaaattttatcacaaaactacaaggttggtgccaatttaatcacaaaactagaacgtttataacctcaacataatggtggtgttagggatttgaactctaagatcattgttctgtgataacttcaatattaaattgagtagattgcactttgagtcacatatttttaccaaagttttattttggatcactcttactgtgttctttttttactttggactaagtattatggccaaattgcactttggatcgagtggcccacatgtaactgacacatggacaatagagattgttatagtctcatcgatatatgagccaaccggtccaaagtgatacatttggcaaaaaaacctagcctattttttttaaaaaaaacaaagggtggtcaaaagtgaaactttggtaagaatttgtggcccaacacgcaatttactctattaaatatgtagttttatggcattagccttttatgataaaattagccctaatgtgctgctttgtaacacaataccttaaatagttttgcaataatttggttaaaatatctatagttttgtgaaatttacacaaactataaaaataaggaataagttcattttagtcccttaacttgacagcaagttcgattttcatccttcaacagaaataccatatacaccgagtccctcaattgtcaaaactgatgcaatgtaggtcccatgatagtatagcgggtggttttgtttgacgtgacatccaaatcaatagtaccgagtcagtgtgggcccatcaagacctcttcacctatctctctcttcctcccctgttcccatctcaccaggcggtgagcggtgaggagaaggccagcggcgagtggttaggagaatggcaactggtaggagaagctagctcgaaggaggaaggacactgacagtgaccatcgacgaagaccttccccgcccacggactctaatgatggcggtggcgaggtggacaaaaaggaaggtgagaatcgggatgacgaggtgaggggaagatgacgagaacaacatgtcactggcatcatcgtcgggacacaaccgacacagaggtggaggcggcgaggaggaaccgcggtgggctccgagcgtggctcgcgaggttggttccacacttgtgcgcctggtcgctcactgccactgctctccccactgcacactctctcgtcgggcgatttaaggaccaggtcactgtcagtcgtgaaatttatgatggcgtgccaccccaacgagtatggggtcaagcgggatggtgaaggacggctgccacaacagcaactagtttggtgttttgatctctctcctcctcttgccatggcatcttccgtcgcggtggtggtgggcttggagtactgtaacaccctgaaaatttcgattctaaaatacgaaattaaaaattcggaataatcaaaaatctttttaaaacctttttgcatgctaggatttattatgcatttgtgtgtatttaggttgtgtgccaaagatctcgattaaatcttatctcttaaagggacgccctcagtccaacgtcctttccttcccttgtcttcacggtctgatttattaagtgcttcggtactaaacaaatcacagacctgaatatataacccgaaaaccttcccttatgtcacaacacgacatatctttctcaatttttaccctccggttatttcaaaccgttatatcattccgactcgataattccctcgaatatctacaaacgatcgacgtatttatttatcgtacattgatttgaatatcctcaaatctattcctaccacgatgattggatttgtatgccacacgtcgtccctaaaaatccttaattcactactgtcgttcgttcgtacgagcattctcaaaataatcctatgacgaccgatgaattcgttcgtcaggcgttaagcctagattcctatttggcaatgcaggttccgtaaataccaaacctcgtattgcagtccaatcattcaatccttgtgcataacggaatttctataccgaacacaaccatacactccatagtaccatacaagcacagtccgatgtacagagccaaataaatgtccagattatacattccaaaatataaatacagtccaaattacaagttgcattaatacatagtatgtcattccaattcaatccctgcaatatgcaaaagttcctattgcaaccaggctacctcccttccctgtcagcccagctcatctcacaacaagtctgttttgcctccctaagctcagagctgcagccaaccaagcaacctcctcagccaaagtctgtattccctccccagccgacctggcagccactcatgctctctttctcagccaaccaccagaagtctattttgcctccctcagaacagcagcatgcacagaacatgttcgataaattgcccacaagccacaacagggtttcacacccacttttgccggcacaacacagagtcttgcaccaaacattcacagccatcaaatgccctggagccctccccaacagcagcaatacattcaccatgaacccaatccacaaaaccctccaccaaatacatgcaaccacagaaccaagttcactgagaagggcaacgccaagatcacaccgaaaggtggcaaagccaagtacgatgggccatgcgtacctggtagtgtggcgatgtcgacgttttggcactgctccctgcccaccctcacatcgcctcccatgcacaggcagccagcaaacctatataaaccccaccaaagacagcagcagctcggctcctctccatttcttctccacctccacgctcgagctctgccactgcactcctcagtcccgtgcacaagctgccatccctccatttgctccgccgcggccggctccggctgggcctcagttgagcaagaggacggataggctgccgcaccattgatcacccgagaacgactaactttaacatctaacccttgactcactaaccagctaacctttttctttctgtttcactgactcttccattttcagtttcgctaacctctgactctctaactctttctttttggattcgctaacccctaactcactaacccgctgactcctttactttccgtttcgctaacttctaactccctaactcttaccttgcactaacccgctgacgttgtcccttagcattatgtattcctttgttgacgacgatcgaacacatggtgtgcgaggacgaacagcaagcctaggatgatccgcgagccggttgtcgacgcccgtcgaccacgcacggtgtgccgctactcggctaccgcaatgtgagcatcttcccccttcccttccatgctctccctttcctagttttgtcgaccgccctctctctgttttcccactcacttgtcgccgtctcggcgcggtgccaccatcgtgcgcaccgtcgccacctccttgcgtggccgacgcctagccggaccgcgcaccgtcactcccctgccactacaccaaccctctcccacgcgcccggccgcgccgcctagtagcctagcctggctgccgccgcgccgtcgctaggccatcgcctgcgccgacacgtccggccgctgccccccgacgtcttggcctcgcccaggacgccgccgagtggccgcgccatcgtccctgccatacgcgcggcatcattgtttctcctcctaacctacaccgccgtcttcgcccgacccaagccgccatggcgccgggccgagcgccgacgtacggtcacctccgcagccgcgacgccttgaccgaatcagccgtcgccttgtcgcctccctccaccatggcgccatgccgatcgaccgccccctctccgtccccatcacagccggccctcccctccatctccactgcctcccatcgccggtctccatctcctcaccgccgaacctccactccagtttcaccaccgccgcctccaagacgacgccccaggccgtcgcccctcccaccacaggccttccctccctccctcaccaccggccaaccgtgccaggccgccgccgtcacccagccgccggcccctcctcccccactgcgctaggccgccgccacacgccgcctcttggccgccggccctctccacttcccagccgcccagccgccatgccgccttccctccgggcgccgccggacaccgtcgcccacggccgcgccgccccgtcgcctagcgccctagccaggccgcctccccaccgagcgtcgccctgccaccgtcgcccccaggccgccgccaagccgccgctatggccgctcgccctctggcgctcgcgaggaggaaacgagagagcagagcggatgagatcgagagaaagagaaagaggataggagagaagaaaggagtgggacccactgaagggacccacgttctagccccttcctcactgagttgacttcccccatggaagtctatatcacctccctatgctctgtccaagcccaaaggatcgagtctgctatcaaagtctaggtaatgcccttccctaacattcgggcatagccaaccgtcggcctccctttccactaaagtccatgttacatcctctattcaactccgagcctctcataaagtctgattcaagtccctaaccgaggagtgttccctcaacggtttataagcccttcccaacttcgaaaattcatatctttccaactgtaattccgatcaactccgttcaacttcggtaatctctctaaaatcgagatctatttaacggcaccattagttgtattgaatgttgctttattttaattcttttaggattgtgtgtggtttatttagccgtttatcgagcgcgaatacccgggttattcttcgatcgtgggaattctagttatctaactggagcaattatctcgaagacattaggaccgatagcaaggcaagtcactacgcaccctccttgaacatgttgatcctatttttataaatgtgttgattacaaataaaattgcatgctaattataaaattacctacaattgtttaagcctacctttgatattgttatccttatgtatttacatacctttgttacctgggtctattacgttacacgtgattatttacttactgcttagccctgcttacatagacgttttacactccatatgtggaatatgtggatgtggttatactgatcactcgatgggagtgattattgggaattgggtggagacataagcgccacccataacatgaaaacctttgcgaaacccgaaaacttaataaaaccaaaataatttcgactggggtggcatggatagaatatgggtggttctgaaaacggctagtcgccgaccctgctcagttaaggaccgagtcaagaagctaagcaggaaacgaaccgagtacgaccacacttcttgagcggggttagacccggtggactaggttattctcgtggggtggcaccccagacatggtaggttctggacattggtatggaaatgtggaagtatgtggtttaatgacgtcaaaactatatatatgtataatgtaatctctgatcttgggagcgccaggactcccctcacaaccggctcgagggaggaatgtggcgccgggggtgcaatggggattcatagtccttggagcgggtgccgccatgcaagggtaactgaaaaatcgagccgtgacaagtctcatgtgctgggtgcgtcacggagtgtgggattaaaagcgtacatccactgcagtgtgagtaaaccaatctattcgaatagccgtgctcgcggctaatacccttgactagactcatagattttgatcctacttagagtaaatataagagacatgtgaaccttgcccaaagagtgggaatgttagtatagtagagttgatataagatgaaatgtgagggtaaaccgaaccaagcgaggcttggagaggtggatgaaccctaggtaattacaacttcaacattaacattgtttttcagttaaaactgctatgtcgtaggtttgttaaatggattgtgaaaactagctttatgcaaataaaccaagccatccttgaacccctgtgtgcactagattcatttcttagtggtggcttgctgagtacgcatgtactcactcttgcttaattaaatcttttagaaaggagttggcgtcgattagatttatgccatgttgctgccaagtacatgttgaagatgatggattagggaccataggttcaccagtcgttgcttgtggagttcgatggaccgccgctgcttcgcttccgctgttctatctattgctttggcattttgtattgtaagtgaccatgcttggtctatttcgggacccaatgagattacccttgtatttttattgtagaaatacatgtaaacgatgtcagttgtgatattatattgtgctatgtgtgtaccacctactgatccagggagtggcactgtatgacacatgggattaccggtgtataaaaccgggggtccccacaagtactctatcagtacaactgttcccctatggtcctccgccgcctcctcaagtggtggtggtggggttgctggggccgcgacggtggattcacccacctccgtcatcgagaaccaccatgcgatgctccacatgtcaacggccacgagtgaactgagagatttgaattaacaaaaatagcacacctatcgatcttcgcatgcaccctgagtcacttcaccgtggtcggcgtgccctggacccctagcacatcccctccgccgcgcctccctcaacaggctctagatctgggttgccgcccagctcaccaacactggctccaaccggctacgctagcagccgccgtggtcgtcttgggtctcctaatctatactgccgtaccgacctacaccagtcttccgtccgccttgttgctgaccagggggtcagcccctcctcacgatgtcgacctaggtgtggagctcgtccatctcctttctcctagcggtggcaccgcgaacgacaacaagctccaccacgacaaacgataagcagcatgacacgacggtgcaccccatcacctccctccggccacctccttgtagagatcactccactacgtacgtgggtcccactgcaacttttttatttttaattgaaccctcactgacatgtgggtccccacggttttatctgactttgtcaacaccacataggtgccacgtcagccgaaaccgtcgtccaaatcaccttgggatctttacattggtttggggagttgagggacccgccataaagatctttacacgggtggtgttcttttcttttggagatgaagatttagtgttttacgcaaaacgatgtggtattaacgtatgattaattgagttataactattacaaacttgaaaaaaatatattaattcgatattttaaagcaactttcgtatagaaagttttcgcacgaaacacaccgtttagcagtttaaaaagactgccacaagtatccaaaattttatctaattttgttggagaagagaactgggtattgtggtccaggatcgaatctaagactcggtgacaaagtgagagacctaaagggagaaagctacccatcggacgtccgatgctcctcaaaaaatcagacggtcaaatgttgcagttgaccaacaagtgaaacattaagttatatatggtgaaaaaaaaaatcagcaactgaaacatttaaatattttatgaaacatggtgaagatacatgttgaaacatgtcgctgccacgtatgaaacaacaagtcatgcgatatgttgttataaagatttaattaaaacgaatacaatggtctaatcggatcatatattggataagtaatttttgagaaaaatcattttgaagcttgctaaaatacatgcatgtgtgcatggatgaagtggagagagagaggagtgagagagtagtagcaggtagtatcaggagttttgtaaaacacactgcagacgcacattgaaacatatcactgtcatgtatgaaacatttagttttaacggtttgaaacatatgtttttcttttgatataatataatcatattgtcagggttatggataccacatacctaatagcagttgactaaatctcggtaggacccaccacatacaatgtcttatacggaaacaaccttcggatatggatggagttccggataaggaaagacaactgagttctacatggaaacgacaaggactactcggattgtatccatattggtttttctagttctatttggacaaggcgacacctatgggtataaatacaaggccccctaggaggagaggggacacggaacaacagaagccacaacatacaagccaacatacgccaagacaagacgacagatatcgacttcagagacaggcatggctagtcccctacggagcctacggataccgtcaggagagatatagcactgtctctgatctcgccggatgcggattcgaggagaaatgctaccctgttgtcgactacgagtcagaccttcagaccgccatgtcgacaacagttagatatgctacctcaaatattgtacttgtgtgatccagatgaataaagagcaacaccgatttcggccaacaggatgtagggtcattacctgataattcgggggcctgaacctgtataaaaatccccgtctccatctcttttatctcagtctcacatatatcctagtaccaacgatccccacactatggaaataccggaatcgcgacatcaaacgtcaacacatatgatatattattgtaaagatttaattgaaacgaatacaacggtgtgatcggtttgtagatcggataagtagtttagaagaaaaaatatttaaaaagaagaggaaagaagttcgtctaatccatctgctgaggcgtctgatatttccgattcgctcggacgcgcggtataaagcgtttcccagacctaaagtgaacttatatccttaaaaataaaaataaattcttatcgatgtcgcccattcggcccaaagaccggcccggcatcggcgagaggtggtctggtctggggtctggctttcgtgcggccgtagcaattccaacggtaaaaagcgtccccctccctctccccctctctctcccctccgccgctcgctgttggccacctcccccgccacaagtctcgcttcccttcccttcccttcccgtccctgtctttgcttctcccgccccgcgttctccacgcgtgccacgcctccgcctccacgcacgggtagtcccccccacccccgcccgccggagcacacgccgccgacggcgtacgttgcgcttcttatctctctgtcgtctcgcaggcggaggcggccgacggagtcccgcacgtacgcctcgccgaccgcccgcgcgcgctcgcggatcggagaggtaatttgcccgcccggagtcctccacgcccggcctgtaatatatcgatcggttgtatatgtttgattcgttttttttttctctcctgctgctgatgacgacgacgacgagtcggtcggtcggtgatgattggttctcccgatgaattagtgtggacgaagtgcccaatcgctacgcttttttaaaaaaataattatttgtatgtttgagcaaacattttaggctattatttgggactaatctttcttgccttgttctatgttgtctgaggattcggtggtattcttgttttcttttttccttccccgagggattttaaaattttccagtttcttcattggattatccccttttcgtttcgaacgctttgccttccaccggttacaagttcacgtcagttttgttccgtgatttttggcttgctttacgcatggatggttcagcagcaagcaaacgttttcatgggaatttaattctttctcaccccgtgctttgataattaatttcgttattgctttaaaattgaagtcgatggtaattaaccgctcaaagcaatgatcctagttactactacacatttctctccgtttcctttgcacaagatttgatttaatctggcaaagcaattattaattgtagccggcagttaatttccacttgttcttccctcattctcgtgctcattgacattcttaacgtctatttaaagctttctcctctttcctgtgcatggctggcgtggtcaaaagttcccttaaccttcacgtgccagctctcagaatcgctggcaataacatgcactttaatccttgtggttatcaaccggttgtgctcttgttttctcataatctcatctacgtttctttccgttgctagcttgtggggaactagtggtcctttcttgctgaatttcgaggtaaggagattctgatggtaatgttgggttgtgtgcctgcgtaatcttttgacgtagaggatggatatttttctttctgttatcttacaagtattgggcactagtgttttcttgaatttcaatccgtgtggtttcttgtgctttcctttgctagattgtaatcgtaaatttaattatcgtgccgtagtgttcttggtaactcatgtagggatgaactaaaagccatagtcgtgttttggcatcttgaatgctttgatcatgattcatgagtacagccttatatgtgctgtacatgtattaagaagaaaattctctctttcataggaaacatttctcaaaggacaaaaaaaatcttttcatatgccaaagtctgctacttgtagtagtttgtgctgcaaatatgcgatgaagcaggttgtaaggcattatcacttaagcagcaatctgccttggggaagctttttccgcagggttgcttgtagttgttgccctgttgtagaggccgggtttttaatccattatctaaaaaaaaaaagttgttgccctgtgtcttgctaatgctatatgtcctcatttcatttctgtcgagtgaaatacaaattcagatctccttaatttctaccaaagaagaattttgcacaaaacatggattttgtcatcttctatgttctgcaccatgtagaacgcttattacgatttgatatttttccgtcatgcttattatactacttttttttctcagtagacagatcgagttttgtctcaaagttcagtttccttacattttggttgtagtatcaacaggcaaaagctgcttccccattccatgctgtacacatttatgaccattcgattttatgcaagtatttcctttaagtgtttcttttctctggcatgttctatgagttggagaggtctgaagcctacagtcctttccatgttgctttagcaaggaatagagaaacgtatcactttctaaaccagtttcttctcataatggatttgcaccatagcattcgaacataaataatttcattgaaaaacataaataaatcaaatttattccttgattatgaaatcttcagaaggtcaaacaaacaattgtttgtaatcagccaacatctagttgctcctatcttccctcttagcttaaggattatattaggattatttattaatctataggctgtttatctcctaaacttttacactcctagatagttactctcctagacctttggtcttatgtaactccctagtattgattgtaattctgctatatatatatgagagttcacctccccacattggtgaggcatctattccactttctctacatggtatcagagcctaggctcttaccttcttttccgctgctctagcacgctgccatcacagctgcatcccagccatgtcgactgaatcaactcagtcctccacctcctcggcctcgagtggttcttcttcttccagcaccaccagcgaattcctccacccctacgccacggtcgccgtcaaatcccacgtccccatcaccctagaaaacacccacccgaactacaacaaatggagggccttcttcacatctttgtgcggcaagttcgggttgatggctcacatcgacggttccgctcctccacgccccaatgacccggcttgggaacaggccgactgctgcatccgcagctggatcttcgggtcagtcgccgacaacgtccttgacctcgccatggagcccgatcagaccgcgcgggagctctgggtcgccatcgaggacatgttccacgccaacaaagagcctcgagcgatcttcctcagccaccagtttcactccatgattcaaggcgactcctccatcgacgattactgccagaagatggagaccgctgccgacgctcttcgcgacgtcggccacgccgtcaccgaatcccaactcgtgcttaacctcctccgaggcctgaacgagcgcttctccaacaccggagataacatcgccggcgcagccgtcctcccaagcttcacctcagcgcgcaacaccctcctgctgaaggagttgcgcatcgccaacgaagccagggtggcggcagccacggcgctggtggccagcggcggcttcggctccggttcctgccctcccggcggctgcatctcctctggcggtgggggtggcggcagtgggagtggtggcggcgcacgccagaccttcccgggcggtgggactggtggcggcggcttccctgctggccaggcccgcaccggcggcaacacgaaccgccgcaaccgcaagggaaatggtggacgtggcggtggaaatggaggagggaacggcggcggcagtgggggtggtggtggcgctcgccaggccttctctggcggcggtggcggcggcgtttcctctggtggcggcggcttctctgctggagggagttcgaccggctgggtggccaaccctagctggaggctggccgggccttgggtttgttttaacccctggccggcccagcaacaggcctggcgcccctcttcggccggccttcttgggccggctccgacggcccactactcccaggccaataccacatatgctgggccatttgtgtcgcccacatctgctcctacaggccagcccaattgggagcaagctggcctcattgcagcactgaaccagatggccttccaaagcccaaacaactgggttttggacaccggcgcgacatctcatatgtcctccactgatggtatcctcgttacacgcttgcctaactcttacacttttattactgttggaaatggtcaaactattcccgttacttgtcgtggcacctcttttctacccataggaaccaccaaatttgcactcaaaaacatccttgtcgccccttccttagttcgtaatttactttcagttcgtcagtttacccgcgacaataaatgttccattgagtttgatgaatttggtttctctgttaaggaccttcagacccggcgcgtgattcttcgctgcaatagtcacggggaactctacacccttccagctgccactccctccaacaccgcgtcctgctccctcgccacttcttccacgctttggcaccgtcgtctcagtcaccctggtccagccgccatccacagtcttcggaatatgtcctctatttcctgtaataaaatagacacctctttatgtcatgtgtgtcagttaggcaaacatacccgattacctttcgataggtctttgtctcgcactttcgctccctttgagcttgtccattgcgatgtatggacctctccggtgttgagtacttcgggttttaaatattatttagtggtgcttgatgatttcagtcatttctgttggacctttccactccgacacaaatctgatgttcatcgtcatcttgttgagtttgccgagtatgtttccacccaatttggcttaccactcaaaacccttcaggctgataatggcagagagtttgtcaatacagccaccacttcctttcttactagtcgtggcacccagctacgactctcttgcctttacacctctccccaaaatggtaaagcctaacggatgctccgcaccatgaacaactccatacgcacccttcttatacaggcctctatgcctccttcctactgggctgaggctctcgccaccgccacctaccttctcaaccggagaccctcctcctctgttcaccactcactaccttttcagctcctacatcgcaccaccccagactactcccaccttcgcgtctttggctgtctttgttacccaaacttgagtgccacgactccacataagcttgcccctcgttcgacagtttgcgtttttcttgggtacccggcctcccacaagggataccgatgtctggatctctccactcgccgcatcatcattttgtgccacgtcgtgtttgacgaatcacgatttcccttcgcggcaactccccctgctccctcgtcttttgattttttgttgcagggactccctccagcggtggctccctcatcagaggttgagcaaccgcgacctctcacggtggctccctcctcggaggttgagcaaccgcgacgccttacggtggctccctccacggaggttgagcaaccgtacgttcccctcttcggccgacgcttgccgaacgacaccgtccctgcggcacgtgacgcccgctcagctggcacgcccttggtcagtgcctcctcgatcggcgctgccctgtcggtcggtgccacccgagccggcaccatgtcaccattccgccatgtctacacccgtcggcccaccgtgacggtcccgccatcatcttcacccaatgtggttgtcacggctactgctcctcagccgcattccatggtgacgcgctcccagactggctccttacggccggttgacaggctgacctacacggctacccacgccaccgctgcttctcctgttccggccaattatcgcagtgcgttggctgatcccaactggcgcactgccatggctgatgagtacaaggcgttggttgacaacggcacttggcgtctcgttcctcgcccccctggggccaacattgtgacgggcaagtggatattcaagcataagttccactctgatggcactcttgctcgtcacaaggcccgttgggtggtccgtggttactcgcagcagcatggcatcgactacgacgagacatttagcccggttgtcaagccggccaccatacgggttgttctcagcatcgctgcatcccgtgcttggccaattcatcaactggatgtgaagaatgcgtttcttcatggtcacctagaggagaccgtctattgtcagcaaccctccgggtttgttgaccccgctgcccctgatgctgtctgtctattgcagaagtccctgtatggtctcaagcaggctccccgtgcgtggtaccagcggtttgccacgtacattcgacagatgggatttctgccttcggcgtccgatacatctctctttgtttacaaagatggagatcatattgcctatcttctgttgtacgtcgacgacatcatcctcactgcttcgaccacgtcactacttcagcagcttatggctcgcctccgctccgagttcgccatgacagaccttggtgacctccacttcttcctcggcatctctgtgacgcgctcctccgccggcctcttcctctcgcagcgctagtacgctgtggatcttcttcaccgggccggcatggccgagtgccattctacatcgacaccagtggacactcgtgccaagctctccgccaccgacggcctgcctgttgccgatccttcagagtacaggagcatcgctggcgccctacagtacctcacgttgactcggccggatttggcttacgccgttcagcaggtctgcctcttcatgcatgatccgcgggagcctcatctcgccttggtcaagcgtatcctccggtacgtgaagggcagcctctccaccggcctccacatcggctccggcccgattcagtccctcacggcatactccgatgcggattgggcgggttgtcccgattctcgtcgttccacgtccggctactgtgtcttccttggagacaatctggtttcttggtcctccaagcgccagactactgtctctcgttccagtgctgaggcggagtaccgtgccgttgctcatgccgttgccgagtgctgctggttgcggcaactgctactggaacttcatgtcccgattgcttcggctactattgtctattgtgacaatgtcagtgctgtttacatgacagcgaatcccgtgcatcatcgacggacgaagcatatcgagatcgacatccactttgtccgtgaaaaggtggctttgggacaagtccgggtacttcatgtcccttcatcgcaccagttcgcggacatcatgaccaaaggcttgccggttcagttatttactgattttcggtccagtctgtgcgttcgtgctcctcccgctgcgaccgtgggcgggtattaggattatttattaatctataggctgtttatctcctaaacttttacactcctagatagttactctcctagacctttggtcttatgtaactccctagtattgattgtaattctgctatatatatatatgagagttcacctccccacattggtgaggcatctattccactttctctacagattacatgggagttaatgcaaaagcaacctgaggttgaacatcactgtctacaagttcaatatatgaaatgttttcttcattagactattttggattgtaggtataggttcataggttctcattccagaaggcatggtaacatctatagacaatgtgagagggttgaccctggccatatcatcaagtgcatttatcggatcaagctttattatcaagaaaattgggctcaagaaggctggggattctggggtaagagcaggttgtacatcttccagcaactatataaactgaatgaacttttgacattgcaaacaaatgctttttatatgtagaattgcataatgttttcaagtgcagttttgaattctttcagccttttatgtagtattacttgttcatattttttaatatgcactgtaggttctggaggtttctcatacttgtatgagccattatggtggttggggatgataactagtaagtgtgtattagaaccatgccttttgaagtattctagtcatatgttttttaaaaaatcaagtattctgcattgtggatttgctgctcactactgactgaattgtgtcacacaccttgagtaataagtcctagttgaatataggtactggttcacttttttgttgtttacttcaaccataaaaaatagaagaaaaaaatggtggatgatgggttagtgtgaagcataatcactgaatgctataattatagcattaagttttgtgtagatccaccaccagtacagtaatcctagggccaatccacatgatttacatcacttcaattaaattatcatatgattcaggatttcaggaatccggagtaggtacttttgcaaagtttgagaaaaagcaaatcttggatcagcttaattctgaacacttgatactcagattaggacctttgttttaaaaaaaacatggatggttttcaacttagcaatttatctgcagaatataatcgctaaaaagtacttctccgtttcataatgtaagtcattctagcattttctacattcatattgatgttaataaatctagatagatatatatgtctagattcattaacatcaatatgaatgtggaaaatgctagaatgacttacattgtgaaacggagggagtagtgcttatgagcatcatgccctgcaattcaatatcactgctgcgatctatcctattattataattattatttacatttccctttctgattatttcactttcaaaaagggtagccatctcattaatacagagttcaaatcaacatactggatactgatacttagatgtgaaccaatatttgtgatatgaaccggaagctcaaacgttattcctaatcatcttgttttaccttgcagtgattctgggcgaggtagcaaactttgcagcatatgcatttgctcccgctgtacttgttactcctctaggagctcttagcattatatttaggtagtatccataccacattctataatttactcatgcatcaaagtatgttttttgttttctttactattttgttcatgcagtgcagtgctcgcacacttcgtcttgaaagaaaaactccatatgtttggtgttgttggctgtatcttgtgtgttgttggctctgttggtatagttttgcatgccccaaaggagagagagattgattcaatagatgaaatatggcatcttgctactgagccaggtaaactacttgaatacttctgtcaataaagaaccaacaggatccatttttatcttttcgtattaatataatatgtataccgtaggatacttttgtactgctaacattttaaaaaacactagtattttcatgtgttactacataatcttttttttttgtgaggaagctttattactaaatctgctaattgtaggacgatgtatccaatgtggatgtttaattttttcccctttttatggggtaaaactgaatgtattccctgacttgaccaatactatggaaaattgcaagactacaaccatcgcaaaattttgcaactttgggtaatatatcccaataataatgatcttaaagttctcttgcgagcatttacttattctctcacttgttctaagaatggaacttcttatagaatgttaaccacaaggttttgttatctggataacttctgcaggttttattgtttattcatgtgtggctgtggtgtctgttctatttttgattttctgggttgctgaacgttctggacacaggaagatgcttgtttatattgcaatctgttcaacaatgggatctctcacggtatataagacatacatcacctttggattcagttaattgaatggatgtggttagtgattgtggattaatacaattatggtttttggaacaggttatcagtgtaaaggcagttgccattgccttgaagctgtcatttggtggatcaaatcagttcatctacatccaaacatggttcttcatagtagttgttatagtttgttgtttggtgcagttgaactacttaaataaggtaagcattcataatgttgatgccatttgtgtaaatttgcatttatgtgtgagtttgcttaaatgggtgatcatgtttggccatgcatgaggtgctctattctgcaacaaacttttaaaccttctatgcttccaatttcatttcagcttatgtcaaaaagtgtaactcaatatgcaaataatcgctctataatgtctgacatgacctaagcctcaattactcaaatatatttatttccctatgtttgtttcataacctatactaagcaagcagtctagcatattacggccagcttgttattttttactcctatgaaagtatggcaaatgctttatttgctttagtttttccaaaggtaagtgcaggtgtaacacactttggaatatgtcttttttttttttgcaatccttatcatcaaagcataactactcaagtcaataatttgttctgaaagtaaaggagaagatatgattgtacactaataatccaaattgtgagttatttctaaaatagatacgtagtactatttattgataattctaaatcataaaggctgctgcagaaatatgtgtttgaactctgtttgagttctgactatttaatttgttgcaggcactggactcatttaatacagctgtggtctctcctgtgtactacgtgatgttcaccatacttactatttttgctaacatgattatgtacaaggtgatgtacttgttactttcaaatagctttaaaattgtatctgcaaatgtgattcctgtagtgtttgtctccctgagagaaaatgcgctccagattagtactgacaatggtttaaaatttcggttcaaaatttcagaaatttcggcccccaccagcaagcacaaatctccccaaaattttctgtttttttctcaaatatttgtaaatttggtcaaaattcgttcaaattcagtcaaaacatgttaaaagttcaaataatttcggtccgaaaaacccggaaatcacaaaattttcaaattttcggcaaccaccgaaatttcggtggcaaccgaaattgcaaaccctggtactgactggcactgtgccacaaattagaagaaactttttagcaataagctatatatttgaaaaaaaaacttatcaataatatatgaagcttttgctttactttttcttattttcttctgaatgtacattaaagaattataaaaaagtttaaactgttttttgaattgcattatgataactgccaggtatctctgcagataataagatttaggcagttaaggtttgtttatatctcacgagttcaaatgtataggttgaacttcagttttttttttctatatctgaagatcatgttttgttttgctgggtgtaggaattccaggcttttatttaggtgtttccatgataactcatttggaggaaattaatctgctagaccatctttataaataaaaaaaaagaaaaagaaaaactcactagaccacaactccacaaggttgttcatcacttattgctttggcctgtgtccctgacttcaatggatcctactatttcaaaattacatcccatcagcagttacagcattatcctttcagcttgatgttctcttgcaatgaccaagagtgttttgagttcaaataactgttttgtatttccaattcaactgacaatctgccatttttgtctgatatatttggccatcgttgccttttctattccaggattcattctcacggaatgcaacacagattgcaacacagttatgtggttttgtgaccatcgttgcaggaacttttctcctgcacaagactagggatatggggaatgaaccgccgctaccagatgatgaaatttgtctcgatggaggaagtgtgcgcccagatcgtctgtcacagtctagtagctagcatgtagtaccgaaaacttttggcttatcgatgtaaaaaatgctagtggatgctgaataaacttgacttgaaaagtcctacaccgattgatacgcagacaggcacaatcttgtgctgtttggcaatcttgttcagaactttgttttctcgtagaatttgaaaattttagggactatgatgaaactcggcattaggcgtttccgctctaccgtgtcgatatgtgctttaactttgttttgtacaatagtagtattgtaaatggaaccttgacaatatttgagttcagagatactacaatgtcagatttccactgagatgtaatccgtccaaaaaaaacctcgaactctggctatgaacccctaaacaagcatttggttagatttatagttaggatttgattctttttggacgaagtaagtatatattcatatggataacgtttcttatggtagtgtggttacacatgtactctctatcctaaaataagttcattttccgctcatctcacatatctctactattataacaattaaaattgttgttgctggaagcttggtacgttgcctcatcattgagtcggtctcaggaatcatgtgagtagcgagcatggtggcatgcatagaaatatttcttttagataatgaccgatcggactcgtcttcctccccagatccctcttgtacgtgaagagatggggctaaaacttttttagtccatatcatatcggatgtttagacgctaatttggagtattaaacatagactaataaaaaaactaatttcataaatgagagctaatctgcgagacgaattttttaagcctaattaatccataattataataactttactgtagcattacattgtcaaatcataatgtaattaagctcaaaagattcgtctcgcgaattagtccaaggttatagaatgtattttgtaattaatctatgtttaatactctaaattaatgttaaacatccgatgtgatagggtcttgaaataagtcctgtttcccagacacagccgaaggctccttgctcttccctggtcacctgggttttctgtccatcgttcccatcggatgagcctgctgcgcccagcccccaagcaaggcagctctccaacacacacatgcatgactatggacagttctaaattctaatgggaacactaaacgggaggtatgagatgatctccccttcatttcaaaactggattatttttttgatagtacttctttaactatgtatatattttcttctgcttttaaactaaacacttaaaaaattattggtgatcaaaatttctaaagtttaatcaaattattttataaatgttaaatatttgtatagatatatactattataaaatggaagatatttttgtcaaaacttttgttacgtcatccgtgtccaattcccattatgcgtaggagactgcgtgggtcatgactcgcgagcaacctgcgaacgagagtccgtgtggatgtggagatagcaagcgaacgagactcgcaaagtccgtgtggatcttatgtacatcgttgcccacttttgtatcatctgattccatttgtattataccaaacggttaacaggacacgtagatactttctaaaagaatatgccaactgaaaaggttgattaaagttgctaattcctccgtcaattcttgctctacttgagataaagcaggacgacatatcgtgctttcccgtatgattgatgttctttttcttcatcatgtctgattatttatccgttgatacatgtatacaaattaaatgatctttacctttctagtatgaataaaaaaacaagacgaacatatcagtagtagttctcaaagaaaaaacatatcagtagtgggggcatgatcaggaagatgttagaggacacctgcgctagcggcggcgttttttcaaaattttcaagtgttggtaccgacaaacaaagtattgaaaaggaaaaagaaaacgttgcaattgtgtgtacacaagtgcacaacttgtaaatacgttcatctcgattgggaggatgaaaatgttgtggtcaagcacggatgcttttcaaataaattggctcgtacaacatgtagtgaaatcgtaacaaattggaagcataattgtcataatactagtcaccaacaaatcttttttagataatagatttttcattaatccggtctctatatctacaaaggatatacatagccaaaacacatacacgagatcatagactctaaacctcacactgaggaaaagaaacaaacacacacacgcacacaaaaaaaaaagcgagaagacttagctccaaccttcatcgaagacttattctttccgtcgcagtgcaagacggggaaagaggagaattagaactagtccgagctacctatattcgcatcatctctccctctgcagaacacaatcaccatctgctgccaacttttatgctttctgtctgccatcgccatccaaaacaccttacgccctgtccaaaacacctaagctgcagccgcattctgaacgcccttagtgcgtcacgaagcgtccttgctgcgccaccaccatcttctgtagaccatcgatatcactgtcgcttctagagcgtcgtggagccgtttagcatgacatgcactgcctctacaatcaagaacttgtcgaagacgctccactgcaatcgagacataaccgtaaccagacctttgcgtcgatgcttgcttggtagcaaccttccctatgatgcagtcatcaagaaccttcgttgctgtcgtccttatctgcatcgggcgagccaacgaccattgcattgtcaaccagccccgtcatcgatgatcaccatcccttgtcctcacctggtcatggtcagaaccagcgccggacctcgccaagtcaccgccatccctaggacaccaacaccaagagcatccgccatcgtcatcacaaactgccatggccgaaccaaccaaccaccactatcaccatacccattagttgagccgccgttgcagggggagggctagtccctcaccgctgtccgtcgtcaccagccctctcctcctgtgaccgaggaatggacggatcggaggactagcccccgacaccgcccaacatcactatgtcgccaccaccaagagcgccgacgccgctagtcctcgctgccaccacgtccacggcggcatggccacacatcatcggagtgcaaggccggccggtaaccacctccactgccacctttctcggccaccaccgacgccatcaccaccatcacatcggtcgatagccatcaagcggcaccgccatagcctggacgtcggccaccgtcagcgtcactaccgtacctccctgaacgaccaccatcagatccgaagcttttttggagcgccaccagtggatccggccctcatcggaatgacagtcatcaagccaccaacaaccaatctgccatcctaccgcgcgcatgcaggagccgcaagtagcaaccggtgaccagcgcagctagtacacctctccgccgccacatcgccttagaacagctgccttccgttccgattcatatttctccgagggcgccattggcataattgagtcagtaacaaattgaattgaaaatgaaaatggaagcataattgagtcactaacgaattgaattgaaagaaaaataaaaaaatgagttttgaagtttatgatatcaagggtggtatttggagttagagagaaaaactaagccgctgaatcaagacgctctatataatggtacattactagtaatggtacaaggtaggggaagggagcccaccgatttgtattttctcctcgagttattctttcatcgtcaattagtagaagagagagcgagggagagagtgggcgcaggcagaatcagaaggagagggagggcgcacggcagcagcagaggggagcttggcgacgatcggaagaatctccatctccagacctctcgaagctcctgatgacaaacaagaaaaagaagtggtcccggttccagctgagcagctcctgtgtccggcctctttcaaggtgactgcagcatcattggagacgcaaggtgactgcagcatcattggggacgcagatagcgatgcctcctggcttgaattggcaggccgccgctgacaccagcaagacggggcatatcaagaatcgcaagcagaagcggtagacgggacgcttcaaccggcgatgaatctatttctttagttggttccatcattgcgttgaatctcttgaattcatcccttcattatctttagtttagattttcattagttgtgatgagttagtttagattggcaaaaaccaatataaagatcatagctctagagattaagcaacttcttgctaggtattgtttggtcctcgattatttttgtcttctgaattttagataattcagaagaaaatccggttcttgcagcccgattttcttgttcgtaggttcttttaatatgaaatctgaaaacttacataatattattaaactattataaattttatttattttaatgctactacattactttttaagtaagtatagtcattagcagtgtattgtttatattatataaaaaaatatatattataaaatttatgtacttcacttgatacatgtttatatatatatatatatatatatatatatatatatatatatatatattataaatttgtttggtgctccatggtgcccgggcaccattgttgaaattgagtatatatccaattcaaatgagtatgaaactttttcaaatatttagatattaacattaactactttactaactagttcaaagcaagtttgaactgaatttgaacttgtttttgttagattttgattctaggtatatagcatccaaacatataattagttaggtatgtaatcatggattgtgagataaagttaaatttgagttgttttgttgttaggtgtaggtataaatcgaattcttataactaggtatatactcataatttgaaaattttgaaatatttgaatgattttgtgcatttgataccatggtgcccgggagtaacccttcccttaacggatcgatttaacggaataaccctgaatctactaaacttctgcagaccgggttgtttaattaagtaattaactaaatagtttattagttcaaataaatgctaaatcatcggctgcatgcaaaacattcggttggagtttgttcctatgtgctcgccttggcagaatatgctctgcttctaaccgtcagaagatatgtagctggccaattgaaaaaaatggcagaacatcagaaaaagaaaatggcagaacatcatcgaaaaaacaaattgttggcagaacaaataccaattttttctctatgtaacggcagttcatattctgcctattgattactaattgcagtttatgtttacatacttaaataggtatgttatattttgctcaggatagtttctgttggtatggatgtacaacacagccgagttgagggatgatactctttttaatcacaacggcataacagaatttgtgcagcagaaagctataatccccctcctgaatcaatggatggtagagataacagaatatcttctgctctttcacaaaccgattccattcactattagacataggactcggcagaaacaattgcagaacatcttttgctccccggcccataatttgtgacgtctgttgtgtccattcaggtcatttcaaatttgtaagaacgcatagaacaaggaataaaaagtgcagaataccttctgcctgttaaattgaatctcatcgtctatatgaagcttataagacttgaaaatgagcagaaacatgaaaggaagcagtatggagtatgtgacctaggaaaggaggcaaggagcagaacatcggttagaaagggagcagaaaactaatttgaacagaagcacatcttctgctccttcaacaaaatcgtcactaagcagaagacgttaagaaaggcaggaaattaaaaagaagcagaaaaatatcaactggaaaggagcataacattatttgtaaacggaacagaacatcgattggaaaggagcagaacattatttggaaacggaacagaacatcaatgggagaaaaaatggtttctgccaatcgtagtgtccatattctgctcctctggcggatgaactaacatgcattcaaaattgtttgtatcccatgaaaataatggttatcattctaaacgggttggatgacatggctaattaacacgccaatggggactccgaaatagcagaaatttgcactgccacatagataagatgggagtagttgctcccggtagtagtacatacatacatacatatatatatacatacatacatacatatatacatacatatatatatatatatatatatatatataaaatagaaaataactatttacgcctttacctctagtttaaaaatgtataacataataaatagtcaatttataaatagaaagctacccaagcaatatttacagtgtattatggtcattagatctataacaaatgtcacgctctaattttttttttatggaactatagatattctaggactatctatatgatggaataattaaaacatgcatatactattacctatagcattttagaacatttttcataaagaaaattatgttgatgctaaatgtcattcacctttcataccagtggtatatagaacaattgtatgacaaggaaagtttttccttggatacacatgctaatcccaacaagtttaacaagacctagtcagactgtcctgatcggacgtgcttcactgttgccatgaaattgatgtcaaaattccattcgagctgctcgcaatatgacaatctactttggggagtaattaagtctcgtctggccagcccatgttaaggccaacatcccatgccttataactcataaataacctaccgtcatgatatgatcatagccactattgatgcaaccgttgctcacatcatagctcaactgggagacatcaagatcaagccacatgagttttggaatctgattcggccacctgctacattgctgacttcaaacggccgccaaatatgcatacaacctctgttttcggcctgtgattacttgatggaaagatctcggagtcctctttccaaaggatccaacctcatcttaaaattccatcttagtcatccgcccaaggtattgtgtcatctataatgggcctatgagcccgtaacttcgtcttggaccctagcctaagtgggacccatatggggtgcgccccaatctggtggagcatgaccttagagaccccttggtcatcatcccaactccttaaatagcctccttaaatagctaggtacctgttagtatttcttaacgacattactagaaatataattcccagcaatgacgcaaaaatactcctggtttattatggttacagagttcatccgcaagcgcacggatataacattgtagcatttcacccgagagtattccaatggtatcgtatttattttatcccgtggaaagatcatatagagagaacattgactaataatttatatattacttgtgataatcatattctaagcaggggttaagataatctaagggtagagtgacacacaagcattaactactcattctcataatatatcatctaacctaagtggatagaaaagagaaagataatctattcctatacttctaatatacatagtatacatacattatagttaactgatatactagctaataccctctattcgatgccttcctggtacttcgagaagccatcactgactgccgagttccttacgacagtccgtcatgaccatacaacccgggctaaatacggaggaataccctccccagggaattaacttaggattatataccggcgcggaggaatacccgtactgagctgtcaccatcagcggcccacctctcatccgcaatatataaccccaaataataatatcccgtaatctagacaccacgcctaaactaccagatactactctaatatcattgtcatgacagagtaattgcataagtaaacattatacccgcaccaaagcatctcccagataagttagctgtatattcagtataacatgaacataatataaagtagatattcatatattcggcaagtattttaataccataaatatataaagaagagtattctaataaaagtacaaagcttacaaaagagaagagaaaagctactagagtcatacccgaactcttcggaaggcttccggactcctgatttctactctattcctattccaccagctagatactactaaactaaacttgagagaaatgagagagctattgcttgaggtgtgtgggtgaagtgagaaggtgaggaaacttgagagaaatgagagagctattgcttgaggtgtgtgggtgaagtgagaaggtgaggggtttatatagcaccccaatgatgtttgtgacggttggaatggtcagaaataccctccaaccgtcattgagagctaatccacaccgtccagaagaaaccctgcatccagcggcgatgagagaagtttggccaaacttggggccggcccaaccaacccatggttcagctggcggcctcctctgttgtaggggtgggctttcggtctagaccgaaaaatcggccagggttgttcgggtttttaaaacttcagtctttgaaaacaagaacccgatatttgcaacaaaaaattcatggaccgacatttcgggtaaccgaagtgtcgggtcggtcttcagttttacccgagctgaccgatttaacaaggtgcacatcgaagtaaataagcaaaagcagaacaaccaaacatgggaatgcatcaaaattatcaattacgtcctgaatatacaaattcacaaagagattaatcaaaatctcaaacaaaaagtcataaagtcatagattacatttccccattgactaaatcaataaaccagaaaccccaagccggcatctgttgcttgcctacctccggcgcaccagcttgctcaaccctcctcgttcgcggacgattgctcaaccccgcgcggccgcgcctccaaggcgaccaactgcgggtggccgagcctaagcctgcggcgtttcttgcctcacccctcagatcctcggttcatggcctcatgggcactgggcagtggagcaattgaagcttagaagggaaggggagaagagaatggaagctcatgggaagaagcggaggcgtgactgcgggatgcagttttctcgtttccgtcggcggcggagtgagagcttgcagagatgccgcatccgtgatttctgtgtggaggggaatatggggataagtgataaggtgtttttttctctttaaaggagggttagcttgtgggctgtacacacgcaatagactaatgggcctggaaaagaatacatgcagttgggttgatcggtccttcggttttttcggttaattaacgacgatgaccgaactcaccgaaagaacttcggtcttttagacctaacacacgatgttgtgaccgataactggaaattcggttttttcggcctcggttacggttttttcggcttcggtcttcggttcacggtttttatgcccacccctactctgttgtttttctccgcagacttgtgaattttggctcagtttgtcgtgtcaattctgagttcttggcccattcatacataagtctggttctcgacatcgtccgattgatttatcgtctgtgttgatgtcgattctcctccactttatggtcattctctgaaaaatgttagtatacctaatactagtggaatattattattttaatatatttatccattgcaagcatcactagttctcctctattttagtaatattgacagtcgaaactgatcgataacgaccgtcaacaggacctctttataatttctcgggttttgttagattaaagttttagccattgctactttaccttgtagttacgtgtgttggctataccacctaattgctcgtcttcagaaccccaacttatcatgtttattcaattcctatttgcaatatcatattgcttttatcttgttcttacttgtttcttcgatttgcttgcaggaataagattgatctgcaccagcaagatcaacaaccaagggggaggtgtatcgatcgctaaggcgtaacacaacgacgtcttgtaaggttgtagtcggatcgtcaacgttgctcccaaatcgtagttatctcaactcaccgaaagatcaggccaatcaaagccgtgagcgtatcgagtggagttcaaggtttatcacgtcgtcatcttcttgtgtatttaatgttcatctagaattcacattgagatattttcttattcttgtggaattcttctacacaagcaaacttcttctaggtcttaatgccattacttgctgtaccgtatgctcaagtgatgagaacatctactcagcaatataatgcataaggctcacaatggttgtgtccaaaaagtatatagtagacctaactaatagctgcttaagtggtaaatatgaagtcttgggtttatatgtatacaacacaaaatattgttgctaccagaattaaatattgtataataacgttgtacttacatagtattagtttacctttataagtagttgttttagactttttttttttgcttggtgaccagcttcagcactatgccttgttgaagagttatcctcaagaattcatgttaacatgattgagttgttattcttcacgtaatcaacacccctggagtatatatacatgggtcattatataaaagtgaagccaagcccacataaaagcctatgggggcttatgtcgaagacaaaatcaaatcagagagattttgtataatattgttaacaacggaattttgcatcaaattcggagaagaaagaagaagatcgaagcagatttggtgtggaatcgagttgaatttggagtcggattgcgcatcggctggataccgtatttgctagaagacagagtgtaagttgatcaaggtttatgaggctgatggccgatacagccaatatgatatgacttgtgctcggtctgggcctatattagaatgactatcattgccaattagagtagggtatttgagtcgatttgatagtgattcggtaagagtgtcgtaggctctccagaccttccattatatttgagagatgaagtgaataattcaagtcatcaaacaagcataatgaaacatcggacgcctcgagagagaaatattgaagacattgctaagcccttagcctgccagtcaacttcagcctgatatgtgcccgtcaaaccactcgaaggcggcgaccagatgtgttacacattcaggaaacttgacaaaaatagctaaagatctacaacctctcaaatattcctaactcatactcatgtaaatctagttcccaggatgtgcactagtgcactagattcacactttcatcttaaacatgattatacatagcaaacacaactaagataaaagaaacttaagacttacaacaacttaataattacatagaccgaccggccaaatagacttattagagaacagcggaagcttgactacccaatcacaagcacatcgactaggggtttaccccattaagttctcatcctagaagaagcaatcggaacccgcatcactcaaagactaaatctaaacctgcaaacaaaaggttatatcaacagcaagtcagtacattaaacaagttaacttgtttaatgtactggcaagcacaaatcaatcctatcatactacatgtaagacatatattcaaaggaaggcaatatgtagtttaatttcagcataaagcaagttttgtttcgcaattcttttgtaaaggagttgatgcttcaattaacaaagacaagttttaagtttcattattaacttcttcataattccatcataatcaatctcttattgtcatacttaacaataagtcataatgtatcaccacacacacaactcaacacatttatcaatttcaaaccaatgtcacatgattacatttttaaaacatagtctatactcatgacacatcaccaaagcgctcttgactgtgagcacggctaatcgattagtttaaatactcatgacacatcaccaaagcgctcttgactgtgagcacggctaatcgattagtttaaagaactctgcagagtttgtacacctttacccacatgatatgatagaagcctagaggctacactctagttggttcagtgccggccaagtaccacacactctacattatgagtgcggactagaggtcacaacgaatcctttacactacttagaatctagccttgcaccagcacgatacgtgttcctccatcctaggcatacttggaaatatgtctagaaccgttaagtggtgggcccacgccttaaacttaacgccgtggtggcggacacgacgggaacccaccacgtggcacaataccgttgtattggacatgtttagtcacctaaactaccacgtcggggtaaataggaagctcctctgaattatacgaactcatacacaccggcctaccagaatgcaaggctagtcctaaatagattaatcagcttagaccatcccatactagcacatgtggatgtacgaataactttaaatgggtgacacaagttcggtccttatggacttgggcaaacactccccctatcggtatgcaactaacaccatatgcacaccacttgccgcccaagtataaaatcacattttacacattttagttcgcaaatacccatcatattcattttattctagcaaaggttcatgtatcaaaatcacattttaattatagatggaatgagcatttgcatatttctaagcatggctaagcaagtagttgcacatagagcatatataaacccatttgagcacaaagagtgtactctaaccatttctagggtttcaaacagcaagaggatcaattattcaaggtgggggtatgtagcaaataggtcataactaccttaacccaattttaaataccgatatagtctaagttcacatgcaactttgcaaacaaatattttcattcctcaaatcatgggattcaatgtgttcaaaggatgggaggagaaaacttgccttgatcagagaaacgttagcacctaatccagtccttcaccgattatgcaattatctatataaatgacacgttatgcaattaaacaccgaaagagctgaaaatccaaaatgctctaaaatgcatgatttatgcacagtgggttggtactgatctaaaatgaatttaggtgaaataatatctattttatcttattccatttgggagttatgaattttagaatttttatcggtttatagtagtagtcttaggtagtgttataaaatacttttgtaaagtgatttttattatattagacttcacaggggtgtggagatgtgttttctaagactaacacatttggtttcacaatttttggagttatagtgattttcttatagattttacaagttacaacgtgttttaggcatatagtgttttatatgttcatgacttttgagttataggtttagaacatgctacttcctgtttaagttgaataaaaggaataatttggttaactaaaacatttttatttcacatgttatggtctgtactactatggttcatattttataaactagagatgctctaatctaaactagcaatatattatattaacctagaaattgtcatatgagttaagttcttctaagttttagtggatgagtatggaactatggcctcactggtcaatcaagtttttatttaggtttaattatacctaaagtgtatatatacttatacatgtttatgtattacttaaataacactatgtgtttaaattcttatttcactaagttaaggttttgatctatgttctctacaaaaggtgccaaattttattttactatgttgaagctaactatttgctggttctatagaaactttgttcatttcatttggactaaaaataaattctctacaagttttacaaattaaaggttgctctatgttagtaaatccttatatgaatatttagagacttttactacacagtaagtatataatcttatttcataacatggaaatacgtgttttggtgatcctatagaacttaagtttattcaaattgaagctaaattgggttctacatgaatttctaaagtttagcttatctaaaactaatcattttagatataatagttttagaggcattttatgcaaagtaagtaattacttttatttcacctaaccagagagtgcatgatgatgaatctgcagtttttgagtttgtttcaaaatgagttgagatgaattttctatgtattttataagtttgtacatgttttatgtatgacctatcttagataaattttagagacattatttgtacagtgagtgtcaagttttatattcctggaataaagttcataacttcaagaatctacagcaactggaatcacttcaaaatgagctatatttgattttatatagattttacaactttgtgcatttttctgctaaacatatatttgtttgggcattttcttaattattcttcagattttaaaggatggggtccacatggctgtgagggaccaatatgcacaaaggcccttggggtttctaggaatcaacccgcagtcctaggcccatatgtcagtgtgtttctacaattgtaaacggatccctgcgcttaatctaattcacggaagtcatccctctgctctagacacagcagagctagccatggctgaggtcgatctcgagctcgccggcggcaaacggtggctcgcttgaggttgaggtcaaaagataaaatgaagaccaagctctcgcgattccattcctctagttttcttggttatgggacattggagtagcgccggcggcgggtctgagcgacggctgtgcttaggctgctactgcatgctgctttggggcctcgttttcgctagatacatgcatgcatgtgcttcctaaggagtccaggatgctcaccgagatgctagacaggactggcaaagcttggtgggtgacggcgactcgtgcaactgctcggcggcggcaatctcctctgggtcgacgatgatagcttgaacagctccaagaactggcatgcatgcagtcatcaagtgttagtgaggtccctatggtggcgtatgtgcgaggaatcgagcaatggctcaccggagaggatggattcggcagtagcgacggtggcaggttcagatcggcgccgaggaaaaaggggcgtgttctccgtgctcctagtgtctccgatggtgattcttgaggcgtcttgaagaggaagtcgaggcaaacttcacggcgcagcggcttggcttgagatagatggattcggccaggcgacaatgatgacgaaacagcggcgctccgatgcgtgcttcagggcgtcatcggcgaggctttcgttcccggcgattggctgcatggtttggaatgagattagagggaatagaaccggcatcaagaggagatgatggaacactaaacaagaagagatgaccgtggctcagagaggctgtcgacggtcgtctctcccgcggcctgtgatggagatgagagcagcggagaggcagagggccttctctctcggattcgtcggctctgggatggtgagtgtggctgggcgacgcgtctgagaggagttgagggtgaagctcggcgttggcacgtcagctccacgcgtcgagcactccctccgccaacgatctctctctctctctctctctctcggctgtttaatcggctggagcggtggagaaaaagtttgacagcgctggagcaagctatagtagctgtcaggtggggccagggcgaagtaaactaggtggaagagagaggtctgggtagaaacatgggtgagattggtttttgatgaatttccggaattatttcttccccctaagtttgcaactcaatatcttaatttgtggactagaagaattagtgtagattttactggtggtagatgatacatctagattccattttctttggtttcacttaaacaaagatgggctattagaaagctagattgaatttttaggaggcttaaacagaggaggaaaattctagaaaaattatatttaggcatgataaataatctagtatttgaataaattattttccatgttcacttatgagcagttaaatgtacttttggatgaagtatggctttagccgattaaaatttaatttgattccttttagtttcctgctttgactgattaatttgtggtattaagcttagttattaacttgtaccaatattatagtgaattgcttgtgctaaacattgtctatctaatttttttccatggtttttaacttgcacataatattttagagaattaggattactttactttgtatatgtgttcccacttcataattgcacctaatattgttacagggattacattaaacttcttttgagctgagaagatgatatttgagtttaatattaagtccacatgttatcacccaagattaactataggtttgtttagtaattttaacccttttatgaaaagcgagaccataatccaaatgcacaagggactcgagcctaggcatgtattatgcacatgtatgctcaaatgcttgatgacatttctagtctaatgttgggaatgaaaaggttttattttgttctcaaattttaatcatgcaatggtttaagttggtcatcacctaaattaaaacggaaatttttggctctcaaaaattggagaagttaacctctaactattttgacaagaaattttaagtcctagaatttcgggtatgttacaaagagaccgccgtatatggtcttgtttgtattttatctttagaaaggtttgactcggggtataaatatgaaccccccctagtattgtaatacgggagacaatccaatacaacttcagcgcattgccaccctttttgtttttacttttcaacgagttcgctttgcaagaggtaacacgtctcgatggcttgtgctattggggctattatgtcgctttagatgttttagttcttttatcatggtcatatgctatcatatgtcttagctaatctagtcttagtatctagatttatctctatcgattggttctcactttagggctcttgctggtattggctaaatcttcctactagattagattagttaagacatctaccatcctgaaaagtaattgtttacttgattatttagactctaggtttctttatctactctgtgatgcatcatccctagtcttttattgaaccctagaaactaatatggaaacaattatacttaagtaaagaatcagagtttcagctgatcttacctaatatacatgcttttttacataagttttatgtatatttgccacttatataaatggatccatttatatagttatatcaagctaagatcggtatcgactgggttatctaaaatactaaccggtcatagtttgcctatataagtctatactagagtattagctggtataatatcttttctttctctaaatattgttctatcgactatttacatgatatcgtctgaagtctatttatcaaacccaaacaaatgatatcataaccgatgaggcatatttagggtttattatgttctattttaccaagtccttagccgatctggtttaactatatcagctgagccgaccaacgataccctatcggcctatcggccgatcggctatcggctgactaactctgcttttctctttcttgctgattgtaggatcaaatcacctggcacgcccttgacacactcaaggttagccttagacctgcactggagttaagcagatctcccagaccgtagtgtttcgcatcaacaaatgtatatccaaattttgcctttgacatattcagtaaatagaagtccacataaaaagtcaaataacaattgatgatcatgatctctctcagctcttctcgcttgcttgttgggctgttggatttttctactgtgcatgggtggatgtttaaggagtgttcagttcgaggcctcctaaagaatcatgagttttcttaaccatgtttgaatcgctactcaaagatcagaaggctagttttttatgtcagtttgatccaacggttgtaatattttgagtgatgtggcttattgtggtgatgagaaagattaattctttcactactttagatctagtcgaaactataacctttgtggttagaacggccgacaagcacaggtcatacatcaacattcaacactaacccacaaacaactaagtaacgagtaacgatagagcccaatgtacaacattatgataatgccgggcttgtggcaatagtgacacatcagctccaactttacaaagaacgtgtgtcattgttgctgggcttgccgccaataaatacaaatgcattataatggtcaagctcattgcaataacaaccaagcagttccgactttccctagtggacgccagccaaagtgaccatattgccactttctacacacggttagcaccgggacacctagaaagacgtcaccatgtgtcattgttgtcaagcttggttgcaccccaacaacgaagcaagtatgactaggtcaaacgaaatgtggttgcgaccttccacaaagcaagaagtggatccacggtgaagtcctcgttaaacatcctaggcctatatatggaaccttggtgtagaagcagaaagccccgagacaacgcaagattcaaccaacagtcatggctgcacaaggaatgtttcccaaagtggtgcatccatggaggacacgacgttaatcgccaccgccactcatctttttttgatcaaacaaccaccacctatctagaagttggaacgaggttttcacatagagatcagtacgggggaaggggaatgccataatgacacctccaaggaagagaattgctcttagtggtgtcgccacaattgaagtaggccaaattgttggaattaatagatgggccttagcccatttgaagattaattttttagaaaaattacaaaagcccacctcatgggatggcatgcatagacagtttagtgccaccttacctattctaagagggggtacctccttataagggaggatgctctcctagccacttgaaacatgtgatgtggagagaagagggggaacacatgcgcgcactcacctcgcctcgcctggcatggcatggtagcacacacacgcgatgtacgcgtcaaatgatccgccaaaattggtttctcacccttgcgcagatgcaacctccttttgcagttttgttttgctacgggaaattcagatttgtttgttttggaaacactccgaataatccgctcggttacgcggagcggagatcgtgcaggcgtccagatatctctatataagttgagtcgctgcctccatgcaacacatgctaaatcaatctagggtttgcctcctcctctgtactgcgacgtcgctcgtagtctactccatcccgcttgttggtgtgcaccggtgatctggagagcaggtctccggaaccttcgccttcgacatattacactgtgagaaggcggcaataaggtttttgggaagcacttcgcgcgactgctccctgttcgaccacaacggttcgtcttcctcttcgctcacgtgctatgcgccgttgtcaacgcccacaaccgcgagtacttcctgctgagcaaccggtcttccggtaccctcagtacgtattcaacatattgcgaatatttgatctgttcatactttactatctagtatacatgtatagatcttatgatgcgtttatgctagcttatatctgcaatgtcatgatttatttatggaataaattaaatcattatgcgcttataaattcaacatattcagtagcaattggcatataagcccgtttgcacaatatttctctacaggagttcattgatcttctgataatttgtcctagtaagattgtcttcatattatgaacatagcacatgactttggcatacacacgctgacacgcataagattattacaaacgggatgaaaataatgttcatgttttgaacagcattttcaccataacttaatcgatgacatacaacaagatctagaaagaatttcttgtcctccgcagttctaattcgcaggctcctgagatttccacaaaacatgcgatagtacatgtgttaactgttacagtggctctagctctagttaccaatcttccttgatatctgtagaacaatggcaaaggcttttccttctacggtggtgcaaaattgcattggcgaatgaatgagtcgtcgtaatccacgtattttgtccataggtgcctgaactggttcataccgatatccagccagggcttcatgttcccgttgaaatgcacaacagcagcgtttctaatctcctccatgcttatgcttggattgtacccgagtccaagaacatgccaagatttttccagaggctttgtggtggagtagaatgtgatcaaaccaggaggcaacgttcctagcttccataatgtcctgttctcattctgcaagatagcatacccacaaatgaagtcatatacatgcatcatgccctattcactagtgaaacagaaggcaatatctacagaaagttcccggtcacaattaactagtagtaaaaagatacagtgcagaaatactaattcaacaacatattgtgcagtacagctaggccagaaccactgagattttaacgaaatacgatcaaattaacagcataacgatgtccaatcaactcctacatgaaagagctaaacaggggcttcgtagttactcttcttacatgaaagagttgttgcagattgccatatcacagagagcagcttggcacacattttaccacacagaaacttcaaacaagaaaagaaaatctacaactgcatcaaagaaaaccgtacctgactctgccagtaatgatattgctcagtactcttttctctcctccaagaatcaagatcaaagaagttcatgccatatgcccatccacatgcattaggattaaacttctctttgataagtgggtgcgagaagttcatatactgccaataccgatgaaacgatccaaagcatgtttccactgctccattcaccttcccatccatgtcaatcttccacaatcctgtaagatcccgctgtaccacaacatcatcatccaagaaaagtatccggtgcagctttgggtacatctccggcaaatagaaccgcaagtgattgagcatcgagagatacttggggttcctaaacttcatattactagcatcttttgtagcattctcaagcttgttctcaaaatagaacttctggaggtttgctgactccagttgccgaagcacaggaacatatgaggagttaagaaacttgtagtcttcaaatgctttgacctcatagtgcgcgccttttaagtccattaggcgaattatcacctggggatacatgaacatactactttgagctcactttcaatagtaaactactaaggttgctatagaacatagacgagatctgaacgtagaattgttttttgcatcgaaactacaacagttgaaggcacacaatagcaatataccaaagaagaccaagatgaaattggcaacagattggagtcagtattgaggttctaacatttcataaggcattagttagcacaataatatttgtgccatggtgacactgaagaaaaacctattctcactttccaagcgcctaagttacttaatacatttttcaggggtttagtcagctataaaagcatgttccctagtggacttctcacaagcagattgtctagttctaaagttccagaacaactgacataattagatctaacagaccatatttgctaacatctgacagtaacacatcagctctaattggtagcagtgtcattgtcattgggtcttccttatcttcactaattctggcaatatgtcgttattagtccgtcttattaaaagtacatatagttcctgctccagagctcaaaatcaaccaagtagtatgtgcttacagcagcaatagttcaaacattgttcagtaaaaacaaaacagagtttatccgtaagatcaaacgctcagcaggaatgccggaatggaatatgcttaggttccatgagttgtcaggaaatcgttgtttcagaaattgccgattaacaaattacatggcatttcaacgagtaagtaacctttggggtaatttatggcagtgttgcaaaacatggattattcttgcttatacaagactaaagatcaattcaattcaatctcgtctaatctgtagttttggtggcaaatggctaaagtgagcaaacaccttacttctggtaacggtatgcaagatttcttagaacttgactagatctcacatctagaaaaaaacaatcataatcactgaaagtgccactcatagtaaggtcaatttttggcaggcagatgctaatcgcctctaataagcaaccattactctcagacttttgttgattttataagatggtaaacaaaatcctgtgcataaacaataggagcaatagcttaaggcatctgcaagatggaggaagagaattgggcaaaacctgcatggcgccaaggttcattcggtcggtgacgacgtggaagacgtgcttggaggggtcgagcgagttggcgacggcggagcgcacgacgacggaggcggcgaggacgttgtcggagaagatggcgtagtggaacatggcggggtcctcgagcgcgtgcggcggcggcaccgggtcggcgtaattctcgggccgtgcgatccgctcggcggtgaggcggacggcgaggcagtggagcggcttggggatggacttggcggcgatgagggaggcgaaggcgccgcgcttcttggcgcgcgcgagcaactcgttctgcgcgaagatggcgtccttgagccgctggatcttgagctgcgggtcgaacagcggcttggcgtccgcgatggcggcgcgcgcggcgcggatcaggtccttggcctgaaggtcgagccgccgcacctcgtcccccgccgacgcgtagccggcctcggacgcggacgcggacgccgacgccgacgcggcggcgctgaggtcacggagcgtggcggtgaggttgcggtggagggaggagagcagccggaggtggcgcgcgcggtcgaggtggagcctgcgcgacgccgcggccagcgcggcggcggaggccgccgcgtccttcgcctgcttccggatctgctccgccctgagccggtccccgttgacagccgccgccgccgccccaccaccacctccacctccagcggcggaggctccccgcgccgcgaccaccaggaggacaagcacgacccccgcgaccaccggtagcgcgccgcgtccacccatggcggctactacttcacaagctcgcaatctccgggaagccgtcgcattggaggagggagagagctcgcagtgtactactactatcgtagtgggaaagaagaagacgagcggcgacggcgaatgcctttttaattaccgggggaagggggggattaagcggcagaagaattgattaataccctcactaatcacatcgccgacactgcactccactcacactgacactggggcccatctgttagtactacgaggtcgccatctggtgtgtggggcccacaggggagtcaaggggtggggcccacctgtcggtggcgtggggcgggttgtttttaggtggtaatccacgaaggggaggatgaggatgggggaatgtttggtgtaggcgaagtgaaccatgtgcgatgtgcggcggcgatggtgcggtggtggtgggaaatgcgaggcggccggaattctggtagtgagccggtgggagagcacacaggcacgcggcgcactcactgtcggatcttctgcgcgggggctaatccctggccctttggccacatggactgttggctgtgatgcctaaatcaaacctcatcaaactttgtagtcccaaattttagcatcaaattttgtagtgccaaattttagcatgttaatatttgataaagttgagatgtgcatagattatatttgagactagttactgcttttgtcaagtttttgtaagaggaggattgtggatcaaactttgtggcaatatttatatatcttgttactttgtcaatttttggttttatcacccgcaaaaaaaaaaggtgtctattaaaatggttaagcttagcaaaagggtgaacagccacgatagttctattttatcgcttgtttctctctgtcagctaaggcgagggattagtatatttttcgcctctcaactcgcaactgtgatacgtctaatcttcaatcctcggcttaagttaggtaaaatgcaatttcgaaagattgaaattgatgcagtacaagtttagtttgactacaatgtaggagtagctttaatttgccacggcatttctcactgtggtctattgggatactttccgtacgtttgctcgttgtctattcaaagggtggaagtcttagagaattactgatactatttattatgttagttaaatgtcgttagatgtggctatatcccacggaagtaggcggtaggtcgtgataagcctgtttatcccttgtatccctccacgtccaaatatgatataagagctcataaaattctaaagccaccacgttggcagaccaaccagaagtggtttctcggtattacctgagtgcctataattaagtcctagccctagtaagcatatatatgttaagtgtaaactaaatattagtaatatagagttacatatgaatcttagttttctatagttcttctccactagctagtgtatatttattagagataaatctcttttgtatcacactacttcattatgatttatcaattaacctttatttatactatggtaaaataattatagcttgattaaggatgcatgaactatatctttacaccatcaccttccctgcggaaatataaatatgatacaccgtcactcctggtgaaatgctacagcggtatccgtgtgcttgagaatttatctgtgaccgtaacaaataccaccaacagcaccgctgtcgccactgctgctggcctcatggagcacaacacatcaggagaggaagtggatggacgggatgcgcattgggactgcggacgacgatggtgacgacacatcgccatctccctctcctccctcctttcctccaccgctgaggaccgccttcctcgccggtcgccactgctgctcccctcctccgtcgtaaccttgaggtcgatggctgggaatggggatgggttgacgcggacgtggtcaaggcaaagctcggtgacacgggcaacgagcacggataagtggaggaggaaggtgaggcccgcgaggaccgcgaggaaaaggaggagcaagagcatgtgggtggaggcagacgaggatggggagctcggtgacaacgatgccactttgtgggggaggaggtgggctctcgggtgtcgcatgtagagggggagcagagcgcccgcacggtgttcgccaatgtagatgttgatgttcccagcgccctccaatacatgtccgttgtcgaggttttccattctgcttccacctcccgacgcttggcatcctcgacattccataaattgctctctcggttccatcccaccgtagttagccccgtttcccaacctctacggcgacaccaagagagaagctcctgggtggcccgtcggtagctgatgggaggagcccatggcgtgggttgcatccctcctatgcctcaccccctcccacgacttcgctccttcttctccccatccctcacctaccacccccattgccatcttccctgcaccgccaccagttagtcgtcgccatcaccacctagggtaacagcgatggcaaatccactggacccaacatagctccttcgggatgatccttagccataaccgcctcgcttgtgggtctcctccttcggagcgctagtgagccctcccctctaccatcggcgctgggtcttgaatctttacaccaggctcaagccactggcctcaaatgagataagaggagagaagggaagataaagaggaagaattcacatttcactgacaagtaggccccatctattgactcagcaagtctagagatggcaacggggaattccccgtcggaggttactccaccatacccgcctccgcggtggggaattttccccatcaccatcaccgtgaaatgcaacggggcaacatctttccccatcaccgcctccgtgcgggtaatttatccccgtggagcctccatccccgctatcaacttactcaacagtcaacatgtatgcatttctcatatcaaacaataaaagattaacactcaaaatagcatcgtcgtcggagcttagcggtggtgaaggcgaagccatggcggactcgagcggctggtcgtcgtgtggactcgtcgttttcccctttgttgccaccgaagccttcacctgcatccaccatcagcaaaacaaataagcctacatgacggatcagatattgacggagggtggaggaggaggccgacgtccggtggccggtgccgagtccacggcgtcctcggacctgggaggctgggagtgaagggaacgggacggcgcggcgtggcgctgggacctggcgcggcggcccggcgctggagcggacggcgacacggcgggcgcggcggccctgagcgcacggacgcctgcacgcgcgggcgcgggcgcgagatcgggagccggcgccgctcagtcgctgtggccgacggacggcggcgtggactggggaatggggacggaggggataaggattggaatggttagggttacacaattgctttatatactctatgctttgggcctggtttttatgggccatatgggccaaatacacaggatattactacacacatacttttatatcgggcctccacggagggcggggacgggggacggggaaccaaacccgcccccgccagacccgacggagaatactttctctccatttgattccccatggagacacaattaataccatcaccatcacctaatgggagaattctccacgggggaccggggaccgggtacccattgccatctctaatcacagtcaattgccacatcagcagaaacctctttcgaaaccatcaaagagtcgatttgcaccagttctcaaaattgagggatgcgttatacccagttttacggttgagggatgcgattcgattagaggtgagagctgagagacgtcaactagacttattccttccacgaaaaaaatgctaaggcccaacgcccaattaaacaggcacgcatcttcggctggccatgggcgaaattgtctgttggggcccatttcaactggcccaaagacttgacaaactgatattccacacgtgtggattggtagcatacagatgcaggagaggaggctgtgtatatggctgtggatcagatgcgggcaggcatgtggctgagccccgcggatgagatgtcgccgcgcaaaaacaatcgaaacggagagacgagacgagacgagagaggtgggcaggcaggcaaggcaggtcgcgccgcgccaaccaacggaagcccccaaaacaccaaaaaccaatcggccgcgtcgtacgctccgcccccatccgtccaactgtcacctcctctaattcccatcctacccctacgctacgcacgaaccaccacccgagtacctccctctcgtctttttgctgctgtttggagccatcctctggagtccggagtatagtcaagtcataccaaattgtttgatggctttaatttgctcttgctgcattacatgattgctatttttattatttatgaatttgataaagtacgttcaactgaaaatgaaagtcaaaatcttataaattaatatccaatcgtgatatgcgcttttgtcagtctctgcttcaattttagcgaccttaataaattccgttgattgctgacgatcgatgacctaattaggattcataaccttttgaaaagcgtaatgatttgtgctatctagtatgcttctcctccaattacatgacctttgatgaaccacgacgatcgttgacaaccagtttggattcggggcgagggaaggagataggagggagagagggttccctaggtttagagggaggctaggggtggtggcggtgggctgactgtgggtggcaacgacgggaaggaggtaaagcggagatggcgctaccacaaccgtggggacacaaaggagggtagtgagctatatggtgacgtcgaagaatttcagtcacatggtggatggtggtagatccaacagtgagagatggaggagggtggggtgggaagatcttagccgagtggtgaggaggagagcgaggtgggggcaccttgttggagctcatgaagaaggaggtggttcgtccatggcgagatgttgcggtgtcggtacaaaattttgatttcaaaagccgtggcgggtggtgttcaatgaagaactaactggaaaacatcgtcagaggtggtgcgcttaaagtgtcgggaggaagaaaggtgtaggatggtggctaggagtaggaggaaggtgttgggtttagtgtgtatatgtatcgattggattggttgatctagatgatcattgatctcaataggatgaatggaaaaaaaatcgagtgagatgggagagagatttcatgcgaatttagtataaatagtccttttatttgacctcccaattgattacttctaacaaaaggccactttacaatagtttcgattgagggtttctttggaacacatgagtttataaatacagaaatagaaaaaattgcaagattagaatgttacctaggaacaaatcatatagaatctaaaacagaattttaaaaagtgatacgttaggaccgttcacatgaaaacaaaataggaatttttatatactctagattaaaaggagacaatgtcttatttgggggttgtagttaccttcggaatttcagctctatcaaacaatatattttctcacctagatattgagaatatatagttatgtgaataaaagaatgaacttgaagataaaaattgagaaatctagcatttcagattctcactagctgagtagcagactactcaacaattgtttctcggattcagaagcttccaaaaacgggccaaagaaagaagttgtgctctgtatccctcctactaatgaacaaattgttcactggggctcaacttggatatagtacgtagaaatatgcacgcactctcctcaccgtctcaccgtccaccacgatctgtttggagatattaagattttgagaagtagtacctgtttagttcgcgaaaaggaaattttttatgttacattggacgtttgaccggatgttggaaggggttttcgaacacgaatgaaaaaactaatttcataactcgtctggaaaaagagacaaatcttttgagtctaattaatctgtcattagcacatgtgggttactgtagcacttatggctaataatggcttaattacgctcaaaatatttgtctcgtgatttctccctaactgtacaattagttttaaatttatcaatatttaatactccatacatgtatcaaaaaatttgatgtgatgtttttggaaaaagtttttgagaactaaatatgaccgtagttgattgatagctaacttctaaagttctagagaacctaggaaatctaacttttgatttttagtttattttcttaattttataactacatattttcagaaattgaactgtttagatagctatacaacttccataaaaaattgcatatgctagaatctccccaaacatggtccaagtgagctaggctcagctaaacttcctagcggtttcatacatgtaacctcgaatatgcttatatatagatggtatatattagctttttaaatttgaatgataatatatttaggattttacgaactcggacaatgttgacgcaatgactccgagcttttgcttatagaaaagaacatgtcatgcgtggataaaagaacggttaacataaatcataagcatggcaatggagagtcctcgacgaagaaaaggtaaacgaacgttacaataaacaaatccatggtcaaagtacacacacaaaatctcacagggcagcattttgttcgttgagagcatctcgctatttggatatagacgcaatgaacaagaaaaatcggaaataaaattaatttcgagttgattcttttatttatagaaagtgtaactgctgagtgtattgtttgtatttataatcttcttaaaaaaggtgccaccacctcaccaagtaccaagtatagtatttttttttatttatcatctacttcatcatgttttctaccaactactacttcataaccaatatacttttattttataaaaataatccctctacatatatagttctatcatattcacacgtacgatgtatcatctacatgtgaaaaacgtccccagaacctcactattaatttattttaatccatagcaaagcacggatatttggctagtatatagatatgtgtgcgcgcttccatctattcttcttatttgaatatagataggctgcggccgtttttcttaaagaatgatataaaagttaattcctacaatgatcagcaaatccgtctagagcagctttaccaaattggagtattataatgttcgtacaaacatgatccaagctattgaatataaaaggtactaagcaaaagagatttttttctacaggttggggagggtgtaccatgttacggtttaagcacaactcctgaggaccttacgcaacaaaagtttacatacgacaaatcatggataagggcccaatgagtaattagaatactataatgtgtcttatgaaaatatacttaacttacattccctccatttaaaaaaaagtttattcctaaccccttagctgctacgatccacgacacaagaagtattatccctcgaatatcccttggatacccacttaagctgagttcgaatcttacaaagattcatattaaatacgggcatgcaaaataagaaagctattagtacataatcaattaagttttaattattacaaacttaaaaatagatatatttgatattttaaagcaacttttatatagaaagttttcgcacaaaatgtgtcgtttagtagtttgaaaaacgtgctaacggaaacagaggtaaaatctccatcttcgtgagaaaagaatgggaccttagtaagaaacacattaggacaagtactataagctcatatgatgatgtggatgagagatatgaaaggagagagaaagaatcacctcccatgcaaggagcatcctctacacaaactctgcgagagatgagaacaagagaccaatgaattgatatgaaacaaataaagtaagttaatatgatgtattgggacaagtgtgctagagataatttattgtatatattgtctcttaattaataagttgatgatgtgtactaaattaagagtgactatcaccccattataaaacttgcccttagtctttttctcttactactaattatttttggagtagctagaaatattttttttccaacacaaagatagtacaactaatagtagttcttaaaaaaaagtaaagaaataagataactagccaggttattcgaaaaagggagagttttttttttgaacattaaaaaaaaagagagggagagttgccatttagtttaacagacacaagtatcggtgccccaaaaaatacaatagtaactctgaatatttgacaaaatcctggtgtccaaatattctttctcagttctgagcattcctgcaaaacctccaattttagcatgtaatacatgcatagttcaagtcactaattaagtaattcaccacctttgagacaatgaaagctcgctacttaaattcaccaccttagattgtgtcagcggtccaccactccaaagcgtgagtgcgagctatgtttcctggtattctcttcgccttttttgaccacctttcacatgagtgtttacatcatggcttggctgattcatcatgcatggattggttacattccttttgaaaggatttagttgcttgggcaatatcgtggtgacgctctattatactccatcctttcctaaatgtttgacaccgttgacttttttaaatatgtttgaccctttgtcttattaaaaacttttgtgaaatatataaaactatatgtatacataaaagtttatttaacaatgaatcaaatgataggaaataataattacttaaatttttttgaataagacgaactgtcaaatatgtttaaaaaagtcaacggcgtcgaacatttagggatggaggaagtagctttaatcaaaataatttttatagagtaagactaggatgaacggaatccttaatgtttatctttaggatgcaatacatatttcagtatgccatcttcttaagtatttaagtatttgtatctttttttaaaaaagataaatatgaatattttctggtgataagtaccatctatataccataataattgtatttctaaaatttgaatttatcttaaaataattatcccaatagagtaataatgatcccattcatcactcatctatttttttcccattttaccctcaactactctctcatccttacctataaaccatttaataagggtatcataatctttcttttcaaaccttaatatgtgctaaacacattagaattacaattaatttgggacggaggtagtatttgaaaatggagcgaataattagtgcaccaagatgacttacttatatgctattagatggttatagttgccatatgggaagatgagaaacctcccaactttcactaaattagatttgtacaggtgaaagaacatatcattggatcatgtttggtaggatgcgcaatttgttttaaatgatctaatttgtggacagttctgaaacttgccctcgaatactgagggctaccactcggtcgacgtgaattagaacttagaaggggccattttccacgtcgttctagttaataagaaaactcttttccggctatatatgacatttgaacaacggtcgattaaacttttaaaattctaacaatcaacaatgttttaaattatgtagttttaaaatataaaaaatagtttgtgtagatctgttataaacttgtaacaaaaagttatagtcaaattgcacataagaaaaaaatcaaatgtgatataattttaataggagagagagagagagagtatatttcaacaccaacacagagagagagagagagagagtattttaacaccaacaaaggtgtctaacatacctctacgaggctacattacatgtgtctctgttaatagttaaacattttttgtcacattatgaactctcgcccgcacatattcgcatgaattagatagtgatctctgttcccaagtacttttaacgagcactattgatatttaaactttgaatattcataagcttatttactttactgtcagtttcagtcataccacattttgacaatgtcaaattctagcacattttagtattatcaaaacttgagagtgttagatgtgtttagtttaaagccttaccaaatcaaatatttgagagtagaaacttatggaattatcaaaatgtgatagagtagcaattgcaaataacatgtttgatttcttgtcatcctaaaagttgctaatactaaaattcgatagagttaaaaatggtaacagtttatattaaccacgtataaatatgaatacattattgaagcatgatgtatataaggtatattaaaaataaccatataatttataattaagaacaagaaaatacgataatttaaaattcatgaatggtcaaaactgagataacaccgatcaaaagcgataaataaaatagtactccctccgtttcacaatataagactttctagcattgcccacaatataagacacatatatatatatgtctagattcattaacatgtaaataaatatgggcaaatgctagaaagtctttcacattttggtccttttaaaaaacttatttcgcaaatagacccctagaaaaacttatcccaaaaatggtcctttttggggcgccagagtggacgacggcgctagccactctggcgccgtccccctgccgacgtggcggggcgatgctgaggtggctagggagtgcgccagagtggctggcgccccccccccaaaattttttatttttgttttatttgtttgatatttttttcacgcttagggacacacaagaaccaaccatagaaaaattgaactcaaatggacgtaatatgtgacctgtagaatttttcctctcctctcctctctccgaactagtgcaaaggagagatgtgcaacttttttatttttattttattttttgatatttttttcacacttaggaactcacaggaatcaactatgtaaaaaataaactcaaacggacgaaatatgtggcatgtggaattttccaaagttttaccgaaaaacttctctcctcgaaaacacaatcttgcaagcggaatttggagtttttaatatcgccgaacccggcaaagcgggggagaatcagatgtaacattttctgtagatgtccgtgcatatattatttgcctgattccgagtccgtatgagaaagttacgcctattttaatagatgacatattttgtccgtttcggtagagttttggaaaattctacaagtcacatattttatccgtttgagtttattttttatacggttggttcctatgttctcctaagtgtgaaaaaatatcaaaaaaatgaaataaaaataaaaaaaattgcatttctatgtactgtttaacttatatatgtcatttcatgtggttatattttgaattagattaagtaatttcatatagtggtagagtgcattatgtttaacatgctgatcaaagggttttactaaaggaattatggtctaattttagtgaaggtgcaaagtagactaagtggtatgctagctattttcagacttagctaagtggtagttcgagtttaaatttttttgtggttggttgtatcgtgatcctaagtgtgaaaaaacatccgaaaaaataaaataaaaatgacaccgttgcaactccatacagaaaaacaggaatggaggcggcggcgccagcatggctggcgccctcctcctgccacgtcggttcgcgtgcgctacggtggcaagaggacggcgccagcctctctggcgccgtcctgttggatgacggcggcagccactctggcgcccaaaaaaggatcatttctgggataagttttttcaggggtctatttacgaaataagttttttaaaaggaccaaaatgtgaaaaatccaggaagtaaggagtatatataagaaaaaactgtgtaacttttcatgggcagagaggagaggaagtaacgataatttatttatttactaaaggatccctgtcagggtcgtcccttgactctgaaaagtccacgccggctaatccccattccccaggggcaatcccgtactttcctccaccctccccccgccaggccgccaccaccagccaaagcatggctcctgtacctctacggcgatacgtcaccaatccccttcacaaaaaaaataataataccagaaaaataaataaataaaaataataaaccaggaaaaataccaccaagaatcaacgggagacgagacgaggagatagagtgcgataagagagagagagagagccgagtcgccgtaggaggagggctagagagagaaaggtggtagtagagtagtagtagatttgaggaggtgagagagagagagagagtcatctctcttctttgtatcccccgtcgccaacttctcctaccaacttctctctctctttttttctcctcctcctcttcttcttggtggccgctcgccgccgccgacgccgacgccgccggcgggtctcgtcgtcggtacgtgttactacgggggccggtctgtggcccctaccctccgtcgccgtcgtcttttcttgttcgcgtgtgcgtttatttctcggccagaggttggcggcttccggcggttcttggattccggcaggattgatcggcgtggtgtttcttggcccccccgcgaattccggcggcattctgatggcgtgcttcttctctcttctttttttctcttgctggttgttttgttgagttcgtgtggggtggtaggattggaaggtggcggtggttggggggtctttgggtggtgagggaagggggtgaattctctgtgttcttgggggttgttgttgttatcatctgagcctcttaggattggttgggtggcggaaggttggttgttgccacctgccctgttcgtgtttgcgattgatttgtactacacagtgggtgcttctcctatgtgcaaatcagataattccgcggtaacaaagtcagcgtaggattatgttggtgatgatgatgactagtgtgcctgaaaattccatctttgcagtagtccttggcttgataatacagatagattctttgcagagttcgtgcacttcactgtcacaacaaagaaatcttttttcctcaagagttaaattctagtaggattcgttggattctgtaggccctggagtgtgcttgctaggtctgtgctaactgttagtggtgactggtgacaagtacatcaccttgatttcttcttttttttttcactcactatttttagggcgtttatttggttactcctttcgccgagtttcagttaaagctgacctgtgcctccacgtgacgttagtggggcttttgtcagatgatacagctctgttgaggatcgtgctggacattgctgcactgtcagcatccttgttcctttgctgtctatttgagccctcaatttccagtgcctgtagtactcttcactgtctccatggaagttgtaggcctgttgaatgttgatgtcttattgtcaacagttttgttcccagagattgataactcacatgagtttatcagtttttgtagtacgattggctcctttagattccattttattgattagtaacttaatgctaataagtaaaaagatatgagtgtgatcttccacatttgtttgttagtgcattaacccgccactaggtttgccagtcgcatctatgtgctactatcacaaaacattttttttttgtctattgatgtgaagaacaaatagtcaatattattctgtatatatttggcaatatggttaagattaccattcatagggaagaaatagatatggccaataagagaagtgtaacgtaattccagttcgagaaatggtggcagtaccaaatgccgaattagcggctgtaccaaatgatcaatgcctctggggtttcccttctcttcagctctccccggtttcaccaatgtgttgggcactgaacactgttgttgtttccagcaggctagtattgtctaatgtaatcaaaagctcttgcattaattgcgacacacttatttctctcacgatgtctccatatttgaacctaaaacctttttttatacaaccttatagtactcgcttttataattggtttagaaaatcttatatttctaactatattgcaggtggcattgaaatatggttagcttgaggaggcgccggcttttggggctttgttctggtatgagactcactgcaatgtcatgatttgtttcctgatatgtttacgtaatttttcagaggaactctgttgtgaaaatgtgctactttaattacttacaagttatatacaaagtcatcatagcatgtctttcttggttatgcttatcaattctattatgatctgactcttcaatggaacatgctatacctactctttcagattaaaaaaagcagtactgtgcacccaatttacaaatatcttgtacatgaaatttcttgattttgtttctctattggtataccatctgtagtcagcttccgttgatacaactttgcaactccttgtatacgtgttttatgttgctccccatggtgtataagttagtgggattgggaaattatgtggagaccataggaggaatttgaatagtcaatggaccttacaagaacatgatttggctgcgaactaattgcttccagcaccagaattatctgtgcaaagaatttagacgggagttgccgtagccctgatggtaccatgattagatggagcacgtataatctgttccatattgcatggtgtggaatgaagtactttaaacatttttctgctgactggttagcttactatgagcagtctttgcaaaatttattatggaaatcaataagggaaggctttctatatatgtcgtgcttcctctaccgttcttgtaatttttattcaaagatgtatatcagtgccctttgtgggttaaaaatcaattttgtttaaagagtaagttgcattgcccaccatctgattgtaaacacagcagcttgcactatttgtaagttaacacaccacttccaccttctaagttcacagaaattgggctctctgaaccaggttcagtggttcatgaacattatgtgaggtgggatgcacccaaatgctggtgtagcaatggccagaggccattcattgtcctgttaggatgctgtgccatactgaaggtgatttctttgggggcatgtctgagctggcttattcacccacacaggaggtgaaagtgaattccttgttttgcaatggcataacagaacggtcaagccgattctcaccctccatttggttagctcctgacatcacaggtcatgttggacacacctgggtctttgttcacatggatatatgagccatttcgtggatgtgcccacagaggtctcaatgcaccatttccatctcattgtcggaatgaggcaaacctgtaacaataaacatgcttttacatggtggaagagtgctcaatttgtccaaattacatggtggaagatgatattttaatgtgttaaatgtcacaagctgcggttttacatgaacagatggtgcaaaattgcatattacttatgtttaaataaatttagagggctatcgcaaatgtcagcgtcaagtgttctggtattcttttctgaagctacacgtaactctagaagtatttcagcaagaagggtgtaagttcatactattgtgtaggcacacagaaatgaaacaagggcagatgtagccagattcgtgcaactatacaaatcctaatatagtaagacatcgtaactacaaatatgctgtgtgaatcactgttagaagcacatggcttctggtgaactgttgatttgaccaacaatcgagattacggacaaaatactattggcaaaataagattatttcgaagtatgactatattgttttctcatcgtacttcttcccatgaacccaagcaaggggatcatttatgcaacacatacctccctagacagctagaccaatgaatgtattatgcgtacactttgaacgctcatattaatttaccttttgtttcagggaaagattcgttaccggttgattttccaaagcctagtgacaatgaaaattctgtggaagttgcacaccctaacataaagccattcagtgtgcacccgctgcccctggtaagtttaacacctcaatgccagtacaactttgctgcaaaaatgttttgctagttgccaccttgtgttgtgtttgattatctgtgaaaaccatgctatcacagtttctatttatagttaatggatattacaagttatggtatattcaagcatatcaccaaagtttctgtgacagaactctgacaatcattttcgcaagttaatttaccattgttggtttaatctttactttgatttttaccattttaattgtattttagaatagtgtgaataaaataactgtattttcgcaaggctgtcattgaccataaaattatactaccaaattagcaccttcaaaaagctaatggtatgatttaaggagttcaaatttatacccactacattgataaatccttgtcaacttttactaaaatggagttaccttggcaataatttgtttatgcccattttgacttctccattaataactggattatgggtccactgcgtttttggcgggcaagtaaatgaggaaaattaatgaggccaaatgagtgaatattaattggaaagcactcatgggctcgtggcacatatttgtgaacaaataaagtagtaaaaagccatagtaaaaagttacaagtatttgtgaaggatatcaaaatcgaatgggattctgattttggttttgaacttcgaatatgtcagaaatatattcagttgctctttctctgacaataaatggtacaacctgtggcttttcagaaataacacgtcaggcactgacaagctatttcttaacatagcgctgtaagatagattgtgcttgactgctccttgtgtcaatggactactttgatggtgttctctttttatcatatctactttaccttctagtacttttatctacatggtgggaaaataagtaaaaccaatggattgaataacaagattgctgctcttgtttgttttgttgcagtgccacttttcaacagtagcttcatgtgttatactaattccttttttttcttctgtttcatatggtttgctttatagtgactccttagaaactacattattttctgatgcttctgaacacatgctatttgcactggcaacgatggttttgtttgataaaatgtacctttttgttgcagactaaaaattctgatgtacttctggaatcttcaaatgggtctgattctttaaaggaagagaaaaaccattactatccaggttcatattatttcatagtactctttgtatttccttaaagtatatagtccaggtaaattttatatggcaaatggttgttttataattcggtatcagaaatcttatctaggtacaactctataatagtcccatcaaattaggctgactttgaacttcttgaatcatgatgaaactgaatccattcttggcccaactttctcattgaagcattgaacacaacaggatatattatgttttagcaaccaatagaaaggacgcttctgatccatgaacagacttgcacatgaattgagattaccccgaacgtgatgtcgaggatgaaactgctctcaccaaaaccagatagagttgaattacataactaggtgacctgacctgggatgtttcactagagccttttctttctctaaaagattctaccttttcttttccatgaattccctttttttattcatgtacagaaactcttttgttattttatttcagatttgcattggttaccttcatccttaatgaggtatccaaaggcataagctgaacgtgtcatttttattttgacaaaaatataatttgcttccttttatatttataggcaaggaaatcaagcgcagaaaacgacatagaagaaagcagtatgtggaccaagaaccatgcataatgagaggggtctacttcaaaaacatgaaatggcaagctgctataaaagttgacaagaaacaaatccacttaggtactgtcgggacacaggaggaagcagcccgactatatgataggtattagctggacttttatgcacgattatgatatttctatctttgcatataatatcatgttctgctttgttagtaatatgctgatacttgtatacaatactataaatctaatttactttaatatcatgaagaagtgatatattgatatatgctagaaaatattacaaaggaactagctagtctgcaaagttatcggagtaatagccaaaaatttttagaagcaccttcaccaaaacagtacaatgttgctttatcaaatctgtttgttgtctcaataaactaaggtttttttattatataatgattaaagactgttaacatcctaaaagatcaatattgttccatgcttaaggtggactactcatcattgttggcatacaaccctcaagcctgtatacatacagtataggttgcatcatatgcatattacttcaaacgccacttgcatatctgccgtggccaactgatcataatttattgtgtaggagaagctgatattttgtttgaactgactagatttgacatatcaacacagggctgcttttatgtgtggaagggagccaaactttgaactttctgaggaagagaagaaagaactacagaattacacctggaaggacttcttggatatgactcgagacaccataaccagcaaaagtaagacgagaattttaaaatttcttgtggttgtcacttaatttttccctgctagtagtcaagtacatcaatatatatatcattagtagtagactataacatactttttgttcatctgtttgtcttcagaacaaaggaaagttggattaataaggcgcaataagacggactcgctggtaggacagagtgatggtgatactgagatgatcaatggtggcggctcatcgcactcggaagatggagatgctgagacctcagcatcttaattaagactgccaccagagttcatggacagccagattgggtctttcaacagattcgtttcaatgaagacataatttccatttaggtttttgttctctcaataattaatttcatgtgcataagggccctgatggtctgataaaggttaggctagagaaatcatgccatcccatataaagttggagatggtccattataggaacacatttctctgagcaaatgagcaatcatgtatagaaacaccaattcctgaactgtgtatatctttaccccaaatttctctacatgtaactagattacacatttaataaagaatttatttttcctttcaattactgtatctttcattctttcaaggaagcatgatccgttacatttatccattaaacattatatgccagtttctagatgacattaaaccttttgtttgttcccctcctcgctctctaaaaattgtattgagtacgagaaagcaaaattagcaccatgatttggccattgtcttgttttttacccccaaattatcgtttacaccacaatttcgtaccagcgtccatccctctgttcatacagacgtgtaagtctgaggccaaccacaatttcgtaccagcgtccatccctctgttcatacagacgtgtaagtctgaggccaaccgaataatttatctgtatctctactacttaaaaaaagtatgtagtggtgacggtgaagccaatcctaacggacacatgtcctatgaaaccattggattgggacagcagaccccatcgcacgcgactcgctttcctccgccgcgtggctcacgctcgcgatccaacggaaaatgctacttttgtacgatttttatacgcgatcgttacgcggacggcgcttggcatcttaacgttacgtggtgcatgcgtatgttgcagcccaagcccatacgcatatactcattattttgttttgcctttttttctctgtatccaaataaatataaaccatgccaaacattggctcatacatgaacatttgctgcatcttatcgacttatcctgatttgtgccattggaaatttagaatacttccagctaggggtgatactaccagggtccgaggtgcaaggatcatatatactccctccgttttataatataagacattttgactttttgcttgcactgtttgaccattcgtcttatttaaaaaaaattagaattattatttattctaaagtactttaaacacaacttttagttttttatatttgcacaaattttttgaataaaacgagtgatcaaacattgtaagaaaaagtcaaaatccattatattataggacggatggagtatttgtaaaactaggttcatgtcaaaataatttacttaacttaagctaggttacatgataagtgttgagcgacagtacgagtatataagattgattaggaaaaataaattactctggttagctgtgccaggaggcttaattataagatgtcaggacgatgatgtgatgagcttggggttttggatatgggccggctcagcgttagaagaggtccagtgtgggaccagaacttgcaacgttaatcagcgttatgagcctagaagagaaacgtttcatcgtacaaccgtcgtaacaaattagtcgtacgtatagcagcgccgcgatccaactggcgacgccgcgcctcccacttcttcaccgcgccccgctacacctccaccgccggcgccccttggcccaaatagcagcccgtcagcccatcaggaagaggagaagtggaatgcctcgatcttttctcggctcatcccgtacgccgctactcttccacgtctctttggtttccatacgccgtgtctcccgagaacatctcgccgtcgccttccccctcgcttggagaacggcagtgggtcacggctagggacgccgcactcactggctgccggccaacccgtcgctgatcgtccagtccaggggcaacagccagcatccggccaaactttcacaatatcagccacgaataagtccatcaaggtaacaaataatgcttcatctatttatttttcaatcaacttcactggttatagacaaaactaattggatgttatttttcatattgtaggattaggagtccagtaggtttcaatttgggttcttgagaattggagtaaaactgcaaattggaggcaaattataagtcatgtaaactgtgattttacttgaatgaatgataaaaaaaagtatacaatttcaatttctggaacgcaatgatagagcatgatacttgatttttttttctgtttcttgttaagagaaaacaaggatggtggatatttagcatttgttaagaagaaattgtttaaggctgaaattgttaattgacatagatggactctgctgagaccgggaaagaaccaactgagattttagccaatacagagataccagagcaggtcaatgactcaaacatcacttatcaaagaattgagtagataaaaaacatctgtgcatcagaacacaaaaaaaccaaagaaggaacatgtaatccaaattatgcggcaaggtacttctattttctttagaaattatgatgtattttcttttgttcaaatatgatttatttttgaaatcttccgctatagattatatttgcagcgaagaagatagttagctcataggttatgtgagacaattaccagagagacaaatggtcgtcgacatcagtggtgcctttctttacatatatgacatggcctgtcttttttatgacagtacttatgttaatggcgatgtaactacaattatgtttagtatgcataccacaacatggctaaaaataatctaattgtttttttgcataggttataaatgcttatattcattgtatatgggaagaaaaacaccttactaatagagatggtggaaaggtatttttggataacactattatttctagcattcttaaaagtgacggtgcctcaaacttaggtcacaaaaattataaggatgatactatttgcggttctatgtcattgaatattgctgtagcattagctaaaaaaattgatgggagataaaaatgaggactttaaaatatctggaataggttttcctggtcaattatggccgtgtttagttcgtgtgccaaaatttgtttaatacttcaaatgtgtgtctgtatacttcaaaaaaattttggcacacaaagtaaacacggccataattgaccaggcaaacctattccatatattttaaaatcctcatttttatctcccatcagtttttttagctaatgctacagcaatattcaatgacataaatcaaagaaccacaaatagtatcatccttataatttttgtgacctaagtttgaggcaccattatttttaagaatgctagaaataatagtgttctccaaaaatacctttccaccatctctattagtaaggtgcttctcttcccttatacaatgaatataagcatttataaactataaaaaaaaaacaattagattgtttttggccatgttgtggtatgcatactaaacataattgtacgtacatcgccattaacatagctactattataaaaaagaaagacaggccatgtcatatctgtaaacaaaggcagcactgatgtcgacgaccatttgtctctcaagtaattgtctcacataacctacctatgatctgattatcttctgcgctgcaaatataatctatagcggaagatttcaaaaataaatcatatttgaacaaaagaaaatacatcataatttctaaagaaaatagaagtaccttgcagcataatttggattacatgttccttctttggtttttttgtgttatgatgcacagatgttttttatctactcaattctttgataagtgatgtttgagtcattgacctgctctggtatctctgtattggctaaaatctcagttggttctttcccggtctcagcagagtccatctgtgtcaattaacaatttcagccttaaacaatttcttcttaacaaatgctaaatatcaaccatccttgttttctcttaacaagaaacagaaaaagaaatcaagtatcatgctctatcattgcgttccagaaattgaaattgtgtattttttttatcattcattcaagtaaaatcacagtttacatgacttacaatttgcctccaatttacagttttactccaattctcaagaacccaaattgaaacatactggactcctaaccctacaatatgaaaaataacatccaattggttttgtctataaccagtgaagttgattgaaaaataaatagatgaagcattatttgttaccttgatggacttattcgtggctgatattgtgaaagtttggccggatgctggctgtgcccctggactggacgattagcgatgggttggccggcagccagcgagtgcggcgtccctagccgtgacccactgccgttctccaagcgagggggaaggcgacggtgacatgttctcgggagtcacggcgtggaaaccagagagacgtggaagaggggcggcgtacgggatgagccgagaaaagatcgaggtcttccacttctcctcttcctgatgggctgacgggctgctatctgggctgaggggcgccggcggtggaggtgtagcagtgctcggcgaacaagtgggaggcgcggcgtcggcagttggatcgcgagcgtgagcgacgcggcggaggaaagcgagaaaagcgaatcgcgtgcgacggggtctgatgtcccaatccaatggttcataggacgcgtgtctgtcagggttggcttcaccgccaccactacatactttttaagtagtagagatatttttatggcccatatttatggaaagattttgatgtctggagatatttatcttggtaatgatttatgtcttggtttgcataatgaattcaattcttggaatggtgtcaaactgtcaactcagtatcactctcgaatggtgttaaactatcaactcagtatcactcatcgatattcatcaggttctttcaggtgtgcacctaaatatgtttttttttgaaacctaaaagaaagtgtaaatgttggtcctaaagtgtggaaatgtttcttgggctactttgatgtagctaatgagctatgaagagtatgtcagaatatgatccttttaatgaacctcttttccggatgttttactaagcattttttttaactctctcgattcatctctgaaaaattttataggttactggccctaagtttggctcaattataaattggtttttccaatattcggtgcgacttccatagttgaggaaccacatatcaaattatatgtttttctaaaggaacatgcaatccaaattgattaggtcgactttttaaccatttagggatgcgatctttaccactttgtgtcttgcatttgcatatggaacatgtcttcatttcggattttttctaatcatagaagatgggacgtagtgttgctcgatcagggccctatcgttattgcgaagcaaattaaacagctgcagtattctgttctacatgtagtatatgaaaatttcccataacggaaggggtattagtcacagattggactaaaacctacataaattttgtcaaaagcgaaatgatgttatagtttcccttaaaacgtgatttcgttctgatctaagccactagaacgggatcggttatctttaatgggctaaaagcctcatctctttcaggtataatccccgtcactaagcaaaggtcactgatgtgagaacatatctcaatcgggcacaaggccatcacggatgaaagtcatctcaatcgggccaaaaacagtgtccgtcacagataagtttgaccaagcaaaccgagtcaaaccaggctaggaaggagcccgtcacggatgactaatctcaatcgagcacactactaagcccgtcacggatgactaatcatctcaatcgggccttaagataaaggccgtcaccgctaggtttaaccaacgtgttgagtcaaaaataatcatgggccggacgaattatctctatcgggcttatagttatagcccgtcagggatgactatatccctatcggtctaaaggttgagaccatcacagatggctctatctctttcgggcctacttgaaatgcctgccagtgatgagtatatccaaaaaaaaattgttttttggctagtctcaggcctttgctagccatgcctgcagcaaaaataatagaagcaatatacatagtcccattcccagcaacccacaattcccagcatccattcacatattctgtcatagcattcattcatccatcacagcattcatccatcacatatttatgtcattcacatcctatttgctcttcaaaccgcctacatgcatcaaaacctgcaaaactgagttataaatttaaacaagtttatatgtaattagaaatgcaaatatttacataacattgtggaaaattgtgttacaaagaatatttacataaatccaatgtttgtcgcaaacattgcaaatgttcaaccattcagagacgagctagctggaccttgactctaaacattccttgttttgacaacatatcatctagtatgaattctgctatcttatctctaatgatatcgaagttgttttccgggatccttgaaagtttttcatgtatgtgaggcgccaagttagtctacatacttggcaagttttcgtcctatgtctataataatcaatggaagcacacacctcaaggtcgagcaatgtcaccttttttgcgaagctcctcatgttatgccagacatggaacccacactggtcgccaacttgttgatgcattgggaagtcttttttgtgaccgagtgtgggatgcccttccttatgccacccgccttttgccacatattggtcccaggcgttgttcaaagcagcttcaatcgccgaccaatcgcatatgtcttttttgatattggagttaaggtagtataccaaattccacttccgcactatgaccaaaagaatccaatgacgcctgtgacattaataaattgctagttaagttttaaaaacttaagttatatgcgtcgcgcatttgattctaagtagggtacacgcttactgttgattgtaggcgcacataatgaattccttgtcttgatggtaccataagcagtccttgatatattctaccatgttggctcgatcgctgtttataattgtctcgttgatgacagctagatcgagtaaggcaacatggggtgcatgacgacagacatgcttccaagttaacctagaaacaagacaagaatccgggtaagcgatagtatatggatagtgaataccatagctcgtatgcaactatacttataaggagtagcacttaaagaggatggtgtcgatcgaccgcaccctgtagaggtcccatagatctttgaagtctatggcgatgaaggcttcaggcccgaggaatggctgtctatcatagtagcccgtcatggaggtctctctattcttcctccttgcgttggacctctccatgcagtagccgtgcaactccttgcatgcagggcccatcttcactaacacgtcatctctgaccaatggcatgtctaatgtgaattctgtcggaggcttaggatgagctgatggcgtcttgccaagatctagcttcttcggagccagaagagtcccttgcacctttcctattgcttttccctttccagcagcttttttgagtgtgtcaaggtggggtggagaagatttcaccctcttgctccttttggcaggaggagggttttaagcctctgcattaagctcttagcatgtcctaattttggtgcagatttttcatgcttgcatcatattttaagaattgcaaaaaccccataccgcgtagattctagagcatgtagcagtcactcttcatatttttgcatagaccagtatccagtagctaaaattttgccaatttaccagtagctacccaacttaattaagaaaccctcacatttttcctagaatttttgcatgcctggagaatgggttaaaaattcgaacagcacagatcaacctgtagtttcagaactgcatcatctagtttagaaattcattacagataaatatatgtgtctaaaaattgtaaatcttataccataatgcggggtgtaaccagggcatccttaggcatgtatttaaccaagaaatttatgcattcacatgttgaattaaggttaacctattgcataatagtatgctggacagaacatgataaaataaccataacaccatttccgagttcctaatgagtttcaattgaaattctaattggtctatgcttccaaaggttgtagatgtctactgtgtggcaaccactaggctattccggaggttatgaggaaggatcattgcctcacatcttgtggctcatgctgcaacatcttggccataaccacccaccggagtatcatttcttttctcttgaacggagttcatctctccgagcttatatggctgagctgtgtatacaaggattttggacccatgaatcacccctttactttcaagcttatggttgggatgcaccctcagcaatgcatgaggccgcatttcaagcgattgtgtattaccgacaccacaggccagggatggatgggttctttcactattttccaactcgtacaaatcaagcaactgccaattactatccaggtcttgagggaaacatgagagagattgacactccacagcttttcttagctggcctagtttgtgctatggatagatatctcgcgaatactatggctgagttgcgtagattgcaagctagagtggtcatgcttgatagacgaatagaacaacttgggcatcaagggcactttgataatgccattatttatgtgaatcatgaacttcagcctcttactgagaccttgcctcctcccgtgggcgtttattaaaacataaacactagagcccacatgagagttggtttccaccgcaatcgtcgaaccatgccagaccctgcacttgttggatatccggtgttgctgggaccattctacgcatttgagcggaatgggagacaataccatttgaccatggccactccgtcaaccacggtgcctcaatctcctatcgaattctcccaagttccatagaatggtgtactaaaggaaaaatgtatggggtgtaactttcatttctttttccaaaagatgcatgagacgacaccctattatgtaatccttctaatggtaaaaaatttgtaacaccgaggcatgaacttggtttcttatgaccattatccaattctatgtatctatgatcacttagatcctttgaaactgatgtactggaatgagacttatgctccttttggaatgaattgcttgctgtccagaaatttgttttatgcaaatatgaaatggaagacttgtaaattcagctataagaaatcattcctgtgttctacatatttagggtgatgtatatgtcaagtctttgcacaaacagctcatatacttgtgtaccttgagtgcaggatgacaaatactcgctctggagctcactctgcagaccgtgccgggggtagtcgacgtactgccaccactgagcagcatgacgatgaaccgtcccttgtgcaactcttagccaatcagaaccggctctttgaaagaatggtggcaaagtctgagaacatgggggctgctatggcacagcaggctaaccaagcaccttccaagttggcagatgttcagcgaactcatccgccacatttctcctttgtggtgctccctgtgtatgcggtccagattttccagtcttcgggtaaggacagttaggagaataatgccccttcttgccgcaattataacatgcgacattatcattacgagatgcatctcccgcagcttgaactgtgcgaggaacttgacggactatctgagtttgtggacgtggaggcacatacatctgccgtggtggctgaggcgccatgggacgaaccacaggagatggagcaagacgaggccgagtggagctgctgccacttgcaaatttctttgcagcccacttgcgcttacgatcttcaacgacttccttctcacttgattcgacacgaagggctttttcaaccagtgacttcatgctagtgatttcatgagcagtaatagcatggttgagttcaggtgcaagacgatctctgcatagctcaaccttctttgcttcagtgttcatgtcagcagcgacatatctacccagatagttgaagcgttccatgaactccatgaaggtcatgtttccttgcttcaagttaagaaactctttctttttgatctccatgagaccaggagggatgtgagcagatatgaatccttcccagaaaacagtccaattgttaggctcatcaggaggaatgagagtcttgtatgtctcccaccaagcagctgatgctccttgcaggtagtatgcagcgaatgtagccttctctacaggatcacactggcaaagatttagcttgattttaatatcacgaagccaatcatctgctgcgagtggatcagctgcagaggagaaatgtggcggatgagttcgctgaacatctgccaacttggaaggagcttggttagcctgctatgccatagcagcccccatgttctcagagttcgccaccattatttcgaagagccggttctgattggctaagagttgagcgagggacggttcatcgtcatgctgctcagtggtggcggtacgtcgactaccccaggcacggtctacagagtgatcaccggagcgagtattttccattctgcactcaaggtacacaagtacatgagctgtttgtgcaaagacttgacatatacatcactgtaacgccccgattttcggtcgggattaaaaatcaattaataatgcattttctagaaattcaataaaagttaaagtaacttaatcaagtgaaataatgggagaattaaaattttcccttaaaaaaatcattggccgaaaatattttataatattctttgggtcctaaatattctctgaaattttcccgtgaagtttcggagctcaagaagtaattttaaagtcacaaagttcattaaactcatttaaataaaaagaaaaaccaaattaaatccctttcctccctttttgggctcggcccaactccctccctcctctttcccggctaggccggcctccctttcccctccctcggcctccctcctatcctccctcgcaaaaagtcttttttgcgtcccttcctctctcccttcgctgacaggtggggccggccccttcctccggctccaaccgccgccatggccgcctgagcctccccacgacgctgccgtttccgccctccttctccaccccgcgcacgagtccgccggccgtgggaccccgccgccccacgtcctcctcatcccccacctctcccttccaaaaccgccacccacaccccacgatgccgcccacgccgccggcggttgccgccccgactccgcctctcccgggctcggtccgacctcccctcccctataaaaacattccccgcacctccctctccattttcccctctctcccgagccctcctgtgcacgaaaaccacgccgccaccgctgcacctctcgccggtgatcctccagccggccgccaccgctgctcctgccgccgccgctccgcgcgaccgccatcagcggcttcgccgcgtcgtgccataccccggcatcccctccgcttccccattgtgtcgccgaaaccacctccccacggcgctccctctccccaccactcatcggcgtgctccagccgccgcctcccgccgctcctagccacctcaagtcgtgccgtcgccgccgctcgcttcgcagcaccgaggagcacctcggccgccgcttttcacgaccagaatcctgctggaacacggttcccctcgcgccggtgagcatccgccgctctttctcacctccggctggcgattcccgccgctgggagcccctatcccattcctaacctttcccttgtcctccccaggtccttccggccgccgtccgccggttcccgctcgcggaacgccgccgggccgccattccgccttcgtcccgaggagcgtcaacgccgagcttccccgtctttccccgcccctcgtcgccgtgtcctcggtgagctcctcctctccctcctagcgccgtgcgccatcacttccgtgcgtgcgtcgccgccttgcgcagccgccgctcgccgccggtggcctttgggcccggcgcgtcgccgcggcgctgtcgtgtgctcggccggctagcttgccgccgtcccgctcgcccgtgccgctcgaccccctggtcgcgccgctccctcgcgtgagccgccgccgccgctcgcgtgcgccgcctttccccacgctgttgctggccgtcgccgccgtgccttggctctgccgggccggctttgtgccgcacccgtgcccctggccgccgctcccctcggccgctcgatcggctcgggccgatttgggccgtccacgtggtggacgcgcacccgaggccatgtgcggacttggtccaccgtgcgccgcccctttgtgccgctgacgtgcggggcccgcgtgtcggcgccggcctccccttgatgacgtcagcgcgtccctattcctctgagaaattaatcattaattgtgttataaattgtatttaattctagaaattcatttaaatggctcaaaacttctaaaattcaaatctaattcatatgaactccgaattgagccgttcaacttgcaaaattcatctaaaattgagctctacatgttttttttactttttatgtactgttcccttagtgtttattagagtttttccttgttttgtgtgccagcgtatagaatccgtcgtttcggaagtctacggtctcgaggaaaagagttcagaagataaaagtgaagaagcaaggcaagtcacacatcccccttgagcatgttgatccaaatttataaatgttttattgtttgcaaataaatatgcatcgttttactaattacatgggtatagggtttacctatctgcttgcttgtaccatgttatttgatatgtgtcctttgtcaaccttgggtgataaatcgactagcttatgttactttgatgacctagctagaactatatgcttagcgatgcttaattaccactagctcagtagatgggataattgcagtattagacatgttagtattatgatgagctacgtgctcgagacatctggccatgtttcatggtcataattatccaactaaaatacgactgaatagcgggttgtgggtgcatggttttgctggtcgcacccatggcaattaaggaccggttcgcgggatgcactagaagacatacaacgcttgccacaagcgggaatgggtaactgcctgccttgaagtgtagcttttctctggttgacgcatccaggcaagggtgggcgtgatggagcagggcgggccctgcgacggcctctgtcgcttccggattcacctagccacgagaggggactgtccgctacctgctgggggcgggggtgaagcctgaggtgtggtgtgcttggtcagagcgggttatatgaagggtcttgtcacaatcactcgacatggtgacgtgtctggccgggcacggtgacatgccagtggattgtgtcttgtgggtacagttgtgcacctttggccagagtaaaactattcgaatagccgtgcccgtggttatgggcgatcgaccagaatcaccgtgattagtctcacacttaataaatcgacccaatgcactgtagttcaggtgggtttgttgggcctgttcaacgtggtgtagcgttgaccagtggagatttaatattaccttaattactcaactgttttactgtttgctaaataaagtgttttacaaccgcctttatgcaaatagccaccaaccgtccttgtatccccttgcacgtctgcatcattggtgtggcttgctgagtacggtggttgtactcagccttgctattattttcccccttttaagaagtgtagtgcttctgagctaaagacaaagttagaggaccaaggctcagaccccagttgagtttttgcctgtggagtggagctgaagccccgctaggattgcctttttcagctgctgctgctttcgtttcggtgtgaggactaagtgcctcttctgtaagtattttacgctttatttacgtttggatctgtatatttacttgtcgttttgtgtaccccggctggtcctggacagggatttaatacacaaaatagtctggaaatttgggctaaatttatgggcgtgacaatcaccctaaatatatagaacataggaatgatttcttatagctgaatttacaagtcattcgtgtcatatttgtataaaacaaatttctggacaacaagcaatttattccaaaaggagtataagtctcattccagtacattagttccaaaggatctaagtgatcatagatacatagaattggataatggtcataagaaaccaagttcatgcctcggtgttacaaattttgaccattagaaggattacataatagggtgtcatctcattcatcttttggaaaaagaaatgtaagttacgccccatacatttttcctttagtacatcattctatggaacttgggagaatccgataggaggttgaggcaccgtggttgacggagtggccatggtcaaatggtattgtctcccattccgctcaaacacgtagaatggtcccagcaacactggatctccaacaagtgcagggtctggcatggttggacgattgcagtggaaaccaactcttatgcgggctctagtgtttatgttttgataaacgcccattggaggaggcaaagtctcagtaagaggttgaagttcatgattcccataaataatggcattatcaaagtgcccttgatgcccaagttgttctatttttctatcaagcataacgactctggcttgcaatctacacaactcagctatagtattcgcgagatatctatccatagcacgaactaggccagctaagaaaagctgtggaatttcaatctctctcatgtttccctcaagacctggatagtaattggtagttgcttgatttgtgcgagttggaaaatagtgaaagaacacatccatccctggcctgtgatgtcgataatacacaatcgcttgaaatgcggcctcatgcattgctgagggtgcatcccaaccataagcttgaaagtaaatgggtgattcatgggtccaaaatccttgtatacacagctcagccatataagctcggagagatgaactctgttcaagagaaaagaaatgatactccggtgggtggttatggccaagatgttgcagcatgagccacaagatgtgaggcaatgatccttcctcataatctccggaatagcctagtggttgccacacagtagacatctacaagcgttggaagtatagaccaattagaatttcaattgaaactcattaggaactcggaaatggtgttatggttattttatcatgttctgtccaacatactattatgcaataggttaaccttaattcaacatgtgaatgcataaatttcttggttaaatacatgcctaaggatgccctggttataccccacattatggtataaggtttacaatttttagacacatatatttatctgtaataaatttctaaactagatgatgcagttctgaaactacaggttgatctgtgctgttcgaatttttaacccattctccaggcatgcaaaaattctaggaaaaatgtgagggtttcttaattaagtttggtagctattggtaaatcggaaaaattttagctactagacactggtctatgcaaaaatatgaagagtgactgctacatgctctagaatctgcgcagcatagggtttttgcaatttttaaaatatgatgcaagcatgaaaaatccgcactaaaattaggacatgctaagagcttaacgtagaggcttcacaaaaatctggtggcctttatatgacaagcaatctgtggttaaaaacaaatcaattccatcctgccccatactaccattttctaggccatcaatgaaaaattaaaattttgaatttaactttggaaaggagtaattagccatttatttactgaaaagttttaaaatatttcaagtactaacttgaatagaatttgtttcattcatttcctagtcttttctatgagttattacttttttatttatgcatcatccaatcctatagaataagatgtggtttttaaaatcaaaacaagattcaaaggaaagaaatttatccaaagagggctaagaagtaataatatattagattttgcaaaaatattcttagtgaggatattatcctcaaaatattttcttttgaagccttgctaccattcaatcttagaagggttcctgcgtcggtcttgctctgataccaatactgtcggaagcactccaaacctcttattatatttgaaggatgaatagaataactcaattcttccatcaaacataataagacattcaacgctccgagagaaagatacatgagaccttgctgggcctttagcctgccagtcaacttcagcccagatgtgcctgtcaagccactcgatggcagcgaccagatgtgttccacattcaggatacttgacacaaaatagctaaagatctacatgatctcaaatatctttaactcatactcatgtttaatatgctcctaacaaaaagaacactctaaacactttcatccaagcacatgatatctctaacataaggagttctaaattctaagtgttagttagaatcatacaacatagtacttagatacatatggccgaccagccaaatagctaggttcgcggaagcataatctacccaaaagatctttcatacaaccgactagggtagaccctagtaagaaccatcctagaagaacgaaacatcccctgcgaaatcctcctcctcaggagtgatctcacctacaaccaattctaagcatacaacaaaacaacaattcatgcgaaatcatcctcctcaggagtgatctcacctgcaaccaattctaagcatacaacaaaacaacaattcaagcaagagtcagtacaaataaattgtaccagcaagcaccaagcaaggctaatacactacatgcatggcatattcaaaataaagcttacattggatattttcagcataaagcatattttgtttgcaaagaccattttcaaattcagatttctttttaattaaatttcagcaagcatacacttagcaaatgggcatcaaagtagatgttaatcacatataacatagctccttattgccttccatggcagcaaggacataatccacaaatcacaccacattttgaagtttaaattcagcttatggaagaatagaacacaagtctatactcatgacatattcacacgccgctcataaccgcaagcacggctaatcgattagttttaactctgcagagtacgtacactttacccacatgatgcgatataataattatgcaaagcatggcatgcgatacataagtatccgatttattactcacaacaaagcccttccaaaattcatgatttagccttacaccagtacgatacgtgtttctccatcctaagccatattcgatatatgacctagaaccgttaagtggcgggcccacgccttaaacttaacgccgtggtggcggacacgacgggaacccaccacgtggcataataccgttgtattggacatgcttagtcacctaaactaccacatcagggtaaataggaagctcctctgaattattcgaactcatacacaccggcctaccagaatataaggctaaaccataaataatttactaagcttgggctatcccatactagcacatgtggttgtactatatacgaaatgaactatacgaagcgaactgacattgagtgaagtccccctatccgcacacaactaatcaccatatgtgtaccacataaggcccaaacctaaaatccacattttctaacattttatttaacaaatatcacattttattatttctatccagaccataaagtagatcattttatatacatagttgagccctggctaagcattttcatagacttgtgaccgcaaacatcataattaatgtgacaaaatgaattgttcctaaggctaggaataatggctaaggtcttttgtggagtttaggtggtaatgcaagttaaggagttgatctaataaatttttacaaagttttagtgaactagtgtataatcaacatgcacattttgcaatccttttcaaataacctccaaatcataggttcaatgtgatcaaagaggggaggtagcttgccttgctcttcccctccttgctcagctacgaagtgggtctcctcgtgattcgactgcgaatcgtctaaacatacatatgcaaaatcaaaattataaacatacataaaaatccaacatgctctaaaatgaatgtttttcatagattaattgtgttatgtgttacattgatttttagtgaaataattttcattttaacagttttcatttaaaagtttcaaatttttaaagtgtcttcatattaaatatagacctacatgcatttcggatttttgagacataaatcttcatgattttgtttagtcgaacatttttatgatgcagagcataaaaatatgattccaaaaaaatttagtttgtaaatttcagagttagaatgaattttctacaaatttctaaaattttaccatttttcagttgataagaaactagttttgcattttctctatttttctcaaatcattatctctctcgggtccaccggtcagtgactatatttttgcgcataagtccctgggttctcaagaaataggtcccgcagcctctaagcacgtgctccaggattttattcaaaaaggtgcttaagttttaagttattaccaaatgagtaaatggtcccacatgtaaagcgtctgtttacccctggagatttttaaatttcactaagccatgcccttgctcttgacagagcagaggagcagctctcccgcgagcttcccgacatcgccggcggtgaacagcggcgattcagttcaagctcccaaaacaaaaggtgtagaggacaaccgtacgaacctataggtagcttttttgcaagttttggtggtctatagcggcagttaggatgttagaagcggcggcaaagcacagcttgcacatgcatgccatgatagagactcgatctgtttgtgcatgtgtttgctgaaggtcctagggactaccagaaagctcaccaagcagcgaacacggctcagcacggtcttggcgatggagagctggtctggcagcggcgcagcggctacggttgtcgttggcggtacacctccggtcttgatctattcaaagagaaggcatgcatcgatttgagatggcacaagacagatttaggcgaaaaagcttgcgccgaagctcaccagagaaggaagaagagaggaatggcgtgggcggccggagttggggaagaagatggagatctcccaccatggttcaccacgtgcctattccttcgggattcttggtcaatgggtgctggtgaagatgatggcgagatggcttgaccaatggtggactgtggaagccgggcgacgagcaaaggcgaagcggcggtgtccagaacgcgacggcgttccgagttgacgtggtcgcgttcccggagattggctgcaccaaatgaggcgttcttggtggcgttagagagggtagtgagactggattagagaatggaaatggagctcaccggttagcaatggcgtcgaggacttctctcgccggtgccgagaatggcgcctctaaaacgtaggctctcttgaaatatccgatgcgatgccttgagagaagaatattggagacattgcttgacttttagcctgccagccaacttcagtatgagatgtgcccgtcaaaccactcgaaggcggcgaccagatgtattacacatttaggagactgacaaatggctaaagatctacaacatctcaaatatttttaactcatactcatgtgaatctaaattctcaggatgtgcactagattcacactttcatcttaagcatggacgtacatagcaaagacatttaagacgaaagggacttagagacttacatcaatttaatagttaagtaggccgaccggccaaataggcatattaaagaacaacggaagcttgactacccaatcctcaagcacaccgactaggggttcactccattaagttcacatcctagaagaagcaatcgaaacccgcattcacgatacgtgttaattcaatagcacgaaacctttacactacttaatttctagccttgcaccagcacgatacgtgttcctccatcctaggcatactggaaataatacctagaacagttaagtggcgggctcacgccttaaacttaacgctgtggtggcggacacgacgagaacctagcacgtggcacaatactgttgtattggatagacttagtcacctaaaataccatgtcgggataaataggaaattcctctgagttatccgaactcatacacaccggcctaccagaatgcaaggctagatatgctaagtagataaatcagcttaggccatcccatactaacacatatggatgtacgaataactttaagttggtgacacaagtttggtccttacggacttgggcaaacactccccctatcggtatgcaactaacaccatatgcacaccacttgccgcccaagtctaaaatcacattttacacattttagttcgcaaatactcatcatattgattttattccagcaaaggttcacatatcaaagtcacattttaattatagatggaatgagcatttgcatatttctaagcatggctaagcaagtagttgcatatacattatatataaacccatttgagcacaaggaatatactctaaccatttctaggggtacaaactgcaaggatcacaattattcaaggtagggaatgcagaaaaaaggtcatataccataacaaaaatttaaatatcgatatagtctaggtttgcatgcaattttgcaaacaaatattttcattcctcaaaccataggattcaatgtgttcaaaggatgggaggagaacttgcctgttcctcagaaatgttagcacctaagtaacctcttcactgtttaggcaattatctatataaagtatacgttatgcaattaaacactgaaataggcaaaaatccaaaatgctctaaaatgcatgatttgtgtactgtgggtaggtactgatctaacatgaatttaggtgaaagaatttttattttatctctttttatttgggagttattaattttagaaattactcggtatagggtaatatttactaggttacgtagtgaaatgtttttgtaaagtgacttttattatgtttgacttctctggagtgtagagatatattttattatgtttgacttccctttggtttcacaatttttggagttatcatgaattttctatgtactctacaagttataacacgttctaggcatatagtttctatgtgtatgtggctttggaggtttaggttcagaacttgttccatcttgctagtgatgtataaaatgaatgatttagtcaatcaattaaattttagttcacaaattttagagttgatattactctactacacattttgtaacttagggaatattctatgttaatgacttaacatatcaacctagagtttgttacacgagctatgttcatctaggttttagtgaatgaggatgaatctatagcttgtctagtctaacaaattttagttaggtttaattagagctagagtgcgtctatatatatatacatacctatgttttgcttaatcaacactatatgattagcacttgttttatcaaattaaggttcagagctataatttgtacaaaaagtgccacattatactttactaaattaaatttcactccttgctgactccatagaaacttggttcactctatatggactaaggatgaattttctacaaattgtataagttaaaggctaccttacgttggttattccttacataaatttttttagaggctttcattatacagtatgcatataattttattgtataacatggaagtataggttttggtgattctacagaacctgaacttactcaaaaaggagttaaaatgaattttatataaacttctaaagttcaccttacacaaaactaattattttgaagatattagttttagacgtatttggcttaaagtaagtatataattttatttctcctatctagagtgtgcatgttggtgaatctgtagaacttaagtttgttcaaaaataagttgagatgaattttggttgcattttataatttgggtatgctttatgtatgatttatcttggataaattttagagacaaaccttgtacagtgtgtcaatttttatgtttctaaaataaatttcataactttgtgaatctatagcaactggaatcatctcaaaatgagctacatttgattttatatggattttacaagtttgagcatttttctgcagaaaatgtaaagctttagtgattttcccttatattttcagattttaagttcatggggtccacatgccatcctctgctaatatacaaaaaggcccctatggttccgaggaatagaacccgcagtccaacatgtgtctatgccacagtttataaagagtccccatttttctcttgtattttcgctttagtcctttacctacatgtcagtgagtgaaatgtctcacactttagtccttacactttatcgaattcgtgaaagagatccctggcttattcctgtacaggaagcaatacagggcagcggcttggccgagctcgccggcggcgattgactgcgatttacgcgtgttagagtttgtgtcgaatatgtgtaggtagtcggttatagtttagaacttgaagttgtactaggtgtaggactagagtaagagtcggactctatcctaagatctctcataaatagaggggtgtgcctgttgtaaccgcatggcgacttaacatagcgagagggagcggctgccggcagcgaccggccgtgagtcgttgtaactctgatacgctgtatatgctggattggggaggagcgcccgtaatcagtgccccggagatgtaggcaactccgttatcaaatatcgtgcctcggtgtcgttatcatgtttggatctcctatggcgtatgtaggcctcggctgaactccgttatcaaatatcatgcctcggtgtcgttatcgtgtttggatctcctatggcgttttcttccgtgtttcgtttggcctacacaacccaaaagactagtctgataggtgagaaccgcccccaccttttaagtcgtgctcccccatcatcaattaccgatgtgggacccgtcacatcaacccatgtgaccccgaagacttgttacctggcctctccaccatgtgacccatggaaattgtatcttttaagtcgacccgtcacatcaacccatgtgaccccgaagatttgttacctggcctctccaccatgtgacccatggaaattgtttagaatgatgtgggacctgtcacatcaacccatatgaccccgaagacttgttatctggcagatttgttacctggcctctccaccatgtgaccccatggaaattgtttagaatgatgtgggacctgtcacatcaacccatatgaccccgaagacttgttatctggcctctccgccatgtgacccatggaaaatgtgaccccatggaaattgtttagaatgatgtgggacctgtcacatcaacccatatgaccccgaagacttgttatctggcctctccgccatgtgacccatggaaattgttccgggttctaaaccttgggctctgataccatttgttagagtgtgcagcctggcccaccaaccgtgggccacccaggtcacattggttctgctctaccacaagcccaattggagccacaactttaggtcctgggcctacacaaccaaaagactagtttgatgggtgaggatcgcccccactttttaagtcgtgctcccccatcatcaattaccgatgtgggactaaacccaacaacgcagcggtgcgaccagaagcaaaaagatgcagcaggtcattgcgaagctaatggtggtaatcttgctagctacggtggtcgtaattgacgacggcgttggtgcgagcgaaggtggttctcggcatgctaaggcatgtcgagctccggctcgtttctatgcgaatgggtgcatgcatgtgtgtctactgggttcttgggtactcattgaagctagacccgcagcttggattggtctgaacatcggtgacagtggagaagacgacctggcagcaacggaaatcggcatggcgacggcgtcgacgttccttcggtcttcgagctgccaaggacagggggggaacggcttagagggaacctatagatgctctacgagtgaggaatcgcgccgaagctcacccgagagcgaggaatggacgacgatggccggcggctggacttaaggtaggcgacgccgatctccctctacgttgcggcattggctgggattcttgagggatttcgaagaggaggtcgtggtgatgatgatggcgcgacggctcggccggatttggtccacggaggccggcgcgacgatggtgatgcagcggtggcactcggtgcgcgctccagagcgtcggagtgcgcggtcgcgttcctgtttaaccgctgcatggaatgggacgaaattagatggaacggagacggcatcaagagtagattgaggaacgcaaaagaagaggaaacgaccgcggctccatggcgttggcgacctttgtcttctcggtggccggcgatggagatgagggcgacggagccctcagtttggtcggctctggagtgaggagtggagatggacgacgcggctggaagagtggagtggagaaggcgagctccgcgttggacacgtcgaggccacgcgtcgagcacgaccagagctcggtcggctctgattcccttcgctctctctctctgtctctgttttcttgtcggctgagggaggttaacaagtgtaaggacaagccagtgagattgtcatgagggatgggtaggttcttgactgaaaatcgattttcagttatttacaggattatttcttttcccatcttcgttagttcttatattaatttatggtgtagataaatccatgtggattttactggaggtaggtgaatatacctagtttttattttttttgggttgcactaaaaaattatgtgtagtttgctctcagaaaattagagaaaataggcttggtgtaaactagtttataaatttttaggaggtctaaacagatgaaataaattctggaaaaattatatttattcatgataaatggcctttcactcatgcacttatatgcagtttaatgcgtattttggtgagggtatgttttagccgattaaggattataattagcctactatttgactggtttgactgatttatttgaggtataaaatttagttattaaattgtacgaaaattagagtgagttgtatgtgttaagtagagcctacatgaattttcccatgattttatcttactcaaattattttagataattagcaagacttatctttatatatgggttttcctcctcataaatgcatctagctatttataaaaaaatatatttggaatctcttgacctaaggtgaaatcatttaacatcattttcatgtctttataattatttgctcaagagtggtgtcgaggagagatcctctctagtgggtggtcgtgagaccccctttgtgagtttggccgggggagatggcgcgatgatcaagagcgtgcttccgcttgcagtctagccgctagattgctacctagcctctgtgaaagacaatggattatataggttcgggccgctatcgagagcgtaataccctactcctgtgtgtgggattatggttaacttttacaagagattttgagctctaagggaaacccagctgttcttcctcatgagctcaagttgtctgagagtcatccctttttccggtgggcgaggtcctccttttatagttcaaggggataccacatgtgccgcctatacctacccgtccgtgaaagggggacccaccttgcctgggtcagacggccgtacgtgccttcaaccagaagcaaggtggtcatgcgtccttgggtggggtccaacgccgtcccccgcctgacacgggggagatccctgttattcaccattaaacgcatggagactttgaaggctcaccatgcgcggagggcgctcctaggaacatgctgatgggacagggcatatctgcccccactccgcctgacacagagcggaacgtgggggcactgccacccgtcccatcgtccgcgaccagtcaccgaccggtcgtgctcgattgacaggggtcaatcgagcggcgccacacgcccaccaacaccgcattaaatgtggcgcgggacggttggggcaccgtgcattgaaggcacggagcagtgtctcctgctctgcctgctctcccagccacgtggtggtcgggcgaggccctcggggtggagcacgctgaaggcccgagggtcgtgacgtggccccccggccgcgtcagtgctacctgaccacccccctcccccccgaggaggcgggggaaagccaggccgctcagccacgtggccagacgggaaggcggcttccctctactgtgcgtacccccgggcccatatcaccgacaagtggttataggtttgattagtgaaattttatcttttatttatgctcatgaaacctaatatgcaatgccaaccaaaaatccaaatgcacaagaaagactcaaatcaaaacatgtcttatgcaagtatgcatgcttacacttgtgtttgcatctatgttataggttaaagatgaaaaggttttaattttttcttaaattttacttcagtaaaagttgggttgaccacacctaagttaaaaatggaaatttctggctctcaaaaaatggaaaagttagcttcctactatttttgacaagaattccttaaccctagaatttgggtatgttaaggggggaggtgcggcctgctgtcgacctccgtaccgtcggcaccaaaatctgtaccgtattgcaattgcagatcttcatctccttcctcaacgacaggaggggcagatacaagagttggagggggatgccgcagcggtggacgagaacttggtgctagcctaggagttatgttgatctgaatgctatgcttgggccattgaataaaggtcccacgtgcagctccaagggtcataatctcgtcatttggtgggtgcgagagagtgaagctaacccaatcgagcttcactaagtccacttgaattttgccatgcccagctagcagctgcgccccatgcattcgggtctctggcgttggcttgaacgcttgaccctctgcggcaggaattgcaaatgcatgtgtcaccctaacaactagggtgcatgatgtgagttcctgagatacattgatacgtatccttagaatatgttagaacgtattgtggtgctaagacaacaaatgcatttatttcttggttttaccgttatgtggtccaccgcggtgggcccttctggttgttctcccgctgcctcagttgatgcgcagctgctacgcctctgcgtggggctcgctttcccttaagcatgtctccacccgagccttcacttgcaacaacttctcatcgaactattctctgagctcttctctaagctccgcacgaagttgttccttaaggcgtgcatatttctgtgcctttgaaagcttgtgcttcttgtactgccacgcgtattggggaaacccaagcttccagggaacactggatccaattccccttgtccgtccacggtgttcttcggttcccaacgctttcgtgaggacgtcatcctcgcgactttgtgaggagacctcttgggaggactgtttctcaacagtcagttcgacctgtggtacagttaggatgaattagatgaagaatacgatataacctaatgaaacttattctatgtgttgaacttacgattttctggtacaccgcttgatcttagggatttaggaacgaaagtgttccatcactattcttcttcacccttgcccttgcccagtttcttgcccactgcaccgggatatcaccaagcacttgcggggtgttagattccgcagtagcttcatcctccttatcccattccgcctgtttccccgtgtagtctctagtgcgaagccggtgcgggtgaaggttctttgcctgcagctccctataggcctcacttcttgctcaagacttaggggttgatttggcagcatggaactcttcccacacgacccgggtgatgaacgggtatttaacaaatggttctgactgggcagggttgaggacgtagtccgtgaccagtgcggttttgaaatttttctacaagttccccatcttgcggatagcctgccgcttgagtcttgcctaggcctctgcagggtactcgaagctttccttgaactgcttccaagcctcttctttttctgcctgtgggaccagaccgatgtggtcctctagaatggtgaagttccgcctccctaggactccgcatatcgctgggaattttttgacagctttcggaggagccgtcggaaatccaagctcgtccacctctgttatggtgtacacttacttaggaatcctattttgggtcctaggagcccagctcgaagttgtcccactagtagtcactgacattggttcgccttgctgcgacattgcctatgtaactgttgtacgggaagaaagttttaaaaaaagtactaagcacgtatatcttcataaactaggaactacatgtgtattctacacaaattcacattgtattccctgatggtttgatagacctctatgtcgtacctgcgttcgcctcatcgacagaacacaagcatggactctctacaaggttggagcagaggagaactcggcctcgacatcagtgtcccgctcgaacttgctagcgacattgatagcaagttcgagcgggatactgatgtcgaggtcgagaccccctctgctccgggcttgagaaacattgatgctacccgtgtgtgcaaggggtgcgaaggggtcactggtcaccaccctgcccctttctcatttctcccccaaaacgaaaatgctagggtttgttgctgctgcattgctcatcgccgggctcgacctcggccaaattcaggaggaaggagatgggcgggaggaaggagaagacccagagaggattttacatcaggaagctcaccgtcgcccttgcctcgccatcgccgatgtcgcccccatccattcctcggtgtccgcgctgccgccacataatccctttcgcgaccgacacctccagcgcttcccatcggatctggccgccacgacggtgacggcggcgaccagcagcaaccagcagcaacaaccatcgccaccatgacgacggtggcgagcagcagcagcaaccatcgccaccacgatgaccacagggagcggcgtgccggtgcggctagagagtggtggagcaagaggagtggcgagcggtgggagcgatggatgcggtgattacgatgacagcgaccagtcgggctcggcagagcaggctgccagcggcaagggccgtgctcggcggcgaggagtgagagggtcactcttttttttttctaccgttctcattctctatgccgtaattagtcactaatataagatatactgtgtaatagtactacgaactccactacatgagctcaaataatgaattgttttacccagaaaaaaagatcctcatacatacggttcatacaaccaaccaaacaaactctcctctaaaccgtatctcttgtgcagacaaccaaacaacatctcatactagccaagctagactaatgcaaacaaccaaacgactgcatgtgtatcccattaattaggataagctcaacctggataagggagatgagccaggctagacagatacgagcaaccaaacacacccttaagtactgcaaatggttaatcaccttgacatttctcttgcataatgccatagcaacggctcgagccaccttgtcaagatttcctgcaagaataacttggtctgtccttgaggctacactattggaaaccaccgcagctgctaggctgctgccctgccatccacaattctagtcctcaaactttggctgctgctgatgaagataatgttctccgtttccattgagattacgtgcctgttttcattgatttataaactcatattcttgtcattttcgtggccttctcaggccaaatgtatatatgcatgattattcttttttctcacctggtttaggagtccaaggctgaaaactttagcacctcttctgtcagcttcatgtattgcctttccaatcaagtcgttgatagctttattctccctttttaagtggtactacacaaacaaattagatgcacgttcttaggatatactactctttgtccctgcattctaattagcataatcatcattattatgaatgatcagatattaattcttacatggaaactgtatcttggtatggcccatgtctgcatgttgaggtttttatctaggacacttctgtcgacagcaaatggagaagaactgaacgcccaggtacacatggcgatgagccatgataggggtgacaagatggttatcatggaccagttactttgattgtatcctctagcagcaaacatggagaatccgggcctcagatgataaatggattggaggtcggtgagatgcgtgaggtgaaccacatccagggatttctccttactgatcttgagcatgctctcgtatagggtgctagatgatttatccatggtattgtagatataatcgtagaatggcatgtaaagggagtaatttgtgcggaactgcgtgtggtgaagagaatgaaacctagcagcggaagaccaaagttcaaattaagtagaaacgattttgtaatgtgcatgtaatgtaagtataaacaacagtttggaatatcgatagagatcaagaaggaacatgaggtacttacgaaggggtgtacataaggtacttgaggggagggaaacatttgaagagataattgggaaccaactcaaaattgcagtggcccaagttgttcatgaagtctatgtagaatatgtaaattgcatatgcaaggatggagatggttccagtcaacaagcatgtgaccactgggattgcaaaagtacatcataggccactaactctgcaaatggatggacgacagctgaataggaataacggaatgatcatattagtcattgataagctcaggttgagtaaccaaaccccaaagaattaaattgaagtgataggctcgtgtctaagagagcatgagagttttttttttctcgaatacgtatgagagttgcatatcattgcattaaagaagaagaagagaggtgtccaagacgcaaatacaaagaaccaaaaagcaaaacacaaaaagagagcaaaagaagaacaaagcacctcaacaaggttgtcccaacaacctaatttaacaagtcttgttaactaggatcaataatcaacgaaaacccttggctcgtctatgttagagtgtgagttgtgaagtagtttgtgtttggtttgtgacatttgtcaacaaagcaattacatcagcaaaagtgcatgtcacctcgtggttgcagtgacctaagtagcatcccaagaacttgagttcaaatcttcatagaagcgaatttcggattgggttgtttgaggggctaagttcctaattttaaacagccccactccggtgctttctactcggagtagaaagaaatctgggccattgatcgtatttaattgtagggctgagatctagttctactcccaccagtattagtggaagtagaaatgtgaaagggtgtttttgttaagggaaaaaaatcgcgtaggggtattatcgtattttttcagtctcttactcaccctatccctatccgattcctctcgcatcatcaccatttcaccacttcccgtcgccattcccctccatccctgcctccgtcgccgtccatctccctcgccgcctccgtcgcctgtcctggtgtctgctccccctccagcgccatcgccttctccgctccctcactgccctcgccgccttctcccccgccagcgcccctccatcgacgtccgcctccccgcctcccccgctatcggcggcttccctccgtcgaagcccttcctcgtcgccctcgccgccttctcctccgtccgcgtctccgcgccggcttgtaagcccccaccatcgccgtcctcctcccccgcccccttctccaccgcccctccacccgcctccaccggctcgcgatgagccctcttcgccgcgtcgcctccccccgccaccgccgccacgttttcctccccatggaccgccgcccccttctccactccaccgctgtcaccatcgacctagccgccgtcgcggctctcccctccccatcatcccccgcccccttctctgtggacatcgacctagccgccgtcgcggttcacccctcctcatcaaccgccgcccccttctccaccatgccggtaccgctggtgtccacctgcatccgccgctcacgtcgttctcctccgcgccactagcaatcccgcgttgatctcctccaagtctccctctagcaacctcctccttggctagtggtaagtaaacgagtcaaaatttcttactgttatgattttgcagataaaggttgtctgttcttcaatccattgcattgtattttgattatttgattgaatggttgggagcagggtcagtttgcaagatggtggcatgcgcgaaggggatccgcatgccggcgaaggggttatcggtgttcaggtgcgacgttgaagtagatgcacgtcggtgacgtcgacagcttactgcattgagtcaccccgaagcgtaaggtttcatataccgctccttctcaaatggattcaaatatgaactataaatattatctcaaaaaggcatcaatgtttgggatccgtcaaatactcaagtagtatctaaatgatttaataaggggaagagagcatagtaaggtaattgtggtaaatgttcgacagataatccatttatgtcgtggttggtagtagtggacgatctttaatcttgctcagttcggagttgatcaaaattccggctaagtcctgtcgaaatgttttcacatccttctgcataatgtaaagggagtgcattttaaatcgtttttcgaaatgggaagcactggtgcaaaatatgaatagaggtcgttgtagttgcctgtatttgaattcctgggagataagattcgctccaatgctccatgaacttaagggtgtacaggccacacgagacgctacaagaatttagtcgttaggctaacacgtttccgtaattgaataatgtgaatatcatgtggaagagtttgagtcacccacccatctccttgctttggcaatttttggactttgttgtattcccattcggtaatattgaaaccaggccaatcatgttttaactgtgggtgttgattctctgtcccgtgtaatcccctctcgatagctagcagctgggaagttttgtgcaacgttggtacggtaaaaacatagcaaaaccgatttgaattatacaagtggaagtgtatcgcttaccacacgccttagatcgggtcgatctttactgattggctttgcgagcgaatatagtatttgcacctcacgtcgcttggcgttaagaacggctaggtaccagtgtgtatctttaatattaattaggaggaaaatctgcagatgttcaacagtaagatagagtcataaattgaattagccattacatagatagcttaaataagtattaccatgtcaaatgctagatagtcgcgtgccatatctctaatccatcgtttatctcgaggtttgcttgcttcgacatgcgctccctctacatttagtagacctgttttaatggccatctctaggaaggccttgccatctcccctgattcctttctcattatagcggaggcattggatgtatgcattcatgacctgaatttgaggttagttgagttacataacaaatataattataaaagaatagtaggcttgttaaataggcgaacttacatcatcatttaagaattctggttgtgttagtacattcattcttatccgtttaacctccacttcttcaatatgcaccatcactttgttatcctccgtattattaatgtaggtaatgaaagggtcttttttttagtcaactctacgaaggtaggacaaattagtaatagatctgtagaaatgttaaatggttaggcattaccttctgaattttttaatggtgtctggccattcatttttttcttcttttgacctcgtaaggcgttctttggtgggcctttgtctatgattttttggtaagatcttccttctcgatgtacactagaaaagggtaagtcaaatcagtaacacacaaacatagaatataagtaaaaaattatggatgatgtagagagttcatacattcagatatttcattcggtgtttggttgttttgtttcctcttcttttcaccccgtaattcgtctgtgtctggcatgttagcttctttatccgtttgcgcttgaaaaggaggaaagttagtaccattgacatgagcatatgtaactattaaatagcataatacctattgttttctttgtctgtgcttgggttctgattatgtccttctttttaccccttgtttcgtagatgaagtcagtccgattagtcagtttgtatgttcttcctgtaggacctgtaagcctcttcctgctttgattgctctggttactgttgtcctgttaggtaacaaagtgcacgttagtattatgataagttgtagaaacgttagcgagagaattaaaattcagtttaccttcgtttcacaagtcatgtttacattttggtttatataggactcttcgttatgatttgatacatgctacctgggatcaatttgttcttgttcaacatcctacaatagcgtcaacctttttttagcggtgttacgtaagtaataatgattaatagtctagcttatcatctttacctcaaacacatgcgtagtatcttttcgttctaggcattttgaatcattttccatgcaatctagtatcaatgatcgcatacgtggccaaaaatcctttgtgaaatcgttgaaattatcttgtaaagtttggatactttcttgtaaagtgatatcggctgattgttcagtggatgttgtagagtgtacttgaatagcacaagtgagaaaaggatgtcaaacatattttgttaaatagagttcgtattaaaaccccataatatatacctcttcaaaagtgcatagaaaatcttcattggtacgtgcttcgagtatatcgctccaatatttccgtttttccgttttttatagatatattcttgcacggttcaaaatgacagtagagtatatcgttccgctatttttccatttttccgttttttgtttacagataaaaggatggacaggtaccgatctcatttacattcttcataatctcctttctccccaatctcatcttcctccgtgtgcatctcttacttcgtcaacctcatcttcctccgtgattgcaatatgtctggttcctcggtatatcccgaagcagattccgccgttcaggtatatcccgaagcagaggtgagtgcatgttcatgtatacacttgtgagttctgagacgtataatagacttattaatcttcgattactagttgccagcaatggtctatgagtacttcggttactgcacatcttatgctgcctagatgttatcctttttcttttccctatgaatagatctactctctttgcattgcgtgtactgtatcttagattcattggttgggtccaacgcactttccctggcctttatttagctcggatcctgtttacattgttttcaagcaatcaatcaccaaattaaaacagatctgtaaaccctgattacatatgcgatcgacttttggtcctagtcatctggctgtcacttaattgtttacgatttggggataattttcttttctaattcattagcgatgagagcgccgtacattgttgagagactatcattaccatttgttgcactggcaatttgctcaagtatatcgacatattatgttatttcttatttaacctagtgcttaatttgttactgtattttttgctgtcttctgttttttctcttaagtatcaactgactcaaaaacttgcatgaataacctaaactttgaccacaattttcttaaccattagtccacacaaaatgtttgttgtgaaactaatttgccatttgtccacgtttgacttttgtaacaaaattttggagtattttaagtttttattttattttttcttttaggaataagctagattatagtatgttgtttcgtattagtaaaacttattattaagtcgcagaattcaacagccaccgaaacaacatcatcactacgacatataatccgtcaaaatcggtcgatgtcatgtgttactagtcaagtttgttaattggcacaatggtttatatgatgatgaactaagccgttgattttttttccttcttaaatgcagcttgatgatttaacatgtggcgatgaaaatatgttagccatgtctaatgttctaaagaacaaaaaatctgcaaggctcaaaaaccttgtgttggctagaaattcattttccataactgtatacaacataaatactttgtcaaatcttgtttatgttggaagggtacaaataactgtggatggtgatggccgtcatattgtatgtaagtgtgtcattacttgttttctatttctgttgctacaaatctgtgtactctataccttaacttgatgctattatatttgttggtatagacccaaggaatgcaccaacggcagaagacatagctagtggaaaggtaaaaaacatccattttataatgaggacggattttagggactggcaggtatgtagtcatttttatataatattgttaatggtctcctcttcgatttggttgtccatattttaattcaatatgttttaatcttgtttcacatttgtgggtagatgatgaaagatgtggttgtggatggcgaagagctaatgcacaaccctcagctcaccacacatggcaccaatgccagcaatacgtcacaggatgaggaggcggcggccaccaccacgtgtgagaaaatggagatgcgggaggctcaccacaagttgaaccgtagtctcttccaagacgatgacaaataattacattcactttttttttacgagaaacagcatgagaggctcctactgtgatatattaagaaatataaggagtttatatacatcaagggaaaaataaaaaaagtaaaaattaaaataaaaataattacaaaggaactaataacaagagtctagccatgattgaaatgggggtctgtcttcttccttcactctttgcataagaagagtggaattttccttaaaggcaaatttccaacattgagagatattgcaatattgtcaaaaatgtgagcatttcgtgatgaccatatctgccagcacaccgtgcctattacctcaacaaagaatggccggttcaatgcatgataggctgactgaatcatttgcagaaattccaaatcctcatcccagttgatacctaggagattccagcatgacttggcaaaaggacaagagaaaaacaagtgtaccatatcttccacaacccctgaagtgcacatcctacatgaggggccatcttggacatgcaattgcctcctttgcagcatatctcgagtgtttaatcgatccataaaaaggagccagagaaatgctttaactttcattgtacacttacttttccatatcgaggtgattgctggatgaggggagaggtgggcaaaaaacaaatcatagaccttcgttgtcttgaaagttgcccctcaggagtaagaccaaatgtctagatgatcagtgagattgatattttccaaaaggcgtgaaagttcagtgaattgctgtaacgcttgagaggatagtggcaaattgaaattttgtcacatcattctgaacataattttgtactgtgatatcctcattgatagcaaaggagaataatgttgggaaagcattttgatgtaggtcttctgtccatgggtctttccaaaagagaaccgaatctcctgtgtttatctgaattttactaacccctctgaagattggtattaaacgaaagatatccttccaccaaaatgatcctctttcctgcagggcatgcggtggcaccgagttgttactatagtatgtattccaaatgagcttcacccagggcagatccctcttattgtagaatttatccagatgtttcattagtaatgcacagttttggaactccagatttatgatacccattccccctcttttttttggtttacaaactttgtcccaggctgctagggacagagatctagcatcaacttcactggacttcctccaaagacaatgccttcttgctctgtcaatgtgctcaattacttttttttgggattttgagagtgcacatgtagtaagttggaagggaggaaagtacagagtttaccaaagttagcctctgcccttggttcagaaacattgttatcgctgggagcctcctttccactctgtctataaggggcgcaaagtctgcaattttaggcttagttgttccaacaggcagtcccagataagtgaagggtaagtttccaatttggcatccaaaagtttcagccaggatctttgaattttcttcagatacgttgatcggaatcatacatgatttgtgataatttatttttagtccagttgatgaagcaaaagactgaaggatgccctttaagcagaaaatctccttttgactggctttcatgataataagagtgtcatctgcatattgaattattgggaacttagtatcaggttggggaataggcagggagaggatgcctatttcgggagctttgtttatcattgattgcaacaggtcagcaaccaaaacaaagagaaggggagagattgggtctccttgtttgacacctcgaaggcatttgaaagtctttcctggcactccattgagaaggacagaagttgtggaagtggttaggatatctttaacccaatttatccaagtgttagtgaaacccttggctttcagtactgtaagaatggctgagtgttctacagagtcaaaagctttctcaaaatcaatcttaaggataagagtttctctttcgctttgataacattgatggatatattcaaaggcccatgccagacagccttggattgttctttgcttgataaagccatattggttttcatggatgagatcgaggatgactgcttgtagcctttctgccataattttggttagaaatttcgtgctagagctctggagtgagattggtctgtaatcatctacagattcaggtgatggtttctttggaacaaggcagataaatgagctattcaggttctggatagaaattttctgtccaaagaaatcatgggcaagtttacagtaatcttcagagatgatagaccagcattttttcatgaataagccattgaacccatctagcccaggagctttgtctgttggcattgttcttatcactttgtcaatttcttcttttgaaggcattgttgacaggtctgataagtgattagaaggatgatagaggtcttgcagattgattatcatttgataaccatttgaggttcccattctggcttgaaaacagcttaggaatgccagggccttctcctggtgagaggtgacaatgttaccatcatttagtgttaaatgagaaaacttgttctgtctgaacctttgcgttgccgcagcatggaaaaatttggtgttgtcatctccaaatttaacgcacagaattgtgcaccttttcttccaaaagatatttctgaagtgcagaagtttgagcacatgttttttagcaatagtcctgaaattccattcttggatgaacagtggcctgacctcttcaattttatccaacatatcaattgcttcattggagttttggattaattgatttaaatttgacaaccttttactccaacgtttgaggcctcttcggacatttttcaatttcccattaataactatcccttgattagttgctctgactgggatatcccaaaaaatcttgacaacctccatgaaaccagtcatatcaacccaatagttctcgaatctgaagatgattgactttggtatagaggtttcaattgaaataacacatggtgcatggtcagagacacatttgttcagagcagtgaccattgtgttgggataatgagttgtccaggagggcgaagtgaagaaccaatcaagctgttgaaggagaggctgactttgcatattactccatgtgtaggttctgcccttgagaggtaattcttgcagtccaatgttactgatggcctcattaaaaatcatgatatcattcatatcgccaccaggcaagtttctattttgcattgatcgaatgaagttgaaatctcccatgagcagccagttttcatcaggttggataactatgccatttagccagtcaacaaaatcatctcgtaaatctcctgaacacggcccgtaaatatttgaggaaccaaatttcattgcttgatgctgtggcagtgaaatgcatagtgattgcatatgggaggctgctaattaaagtgccagtaaataggtgactgttccaaattacaatgagccctcccgaagctcctagagaaggatggtagcaaaatttatcaaaccttttaggggcaaacttccttatatacgagtgatcaaaatgctcccttttttttcttgtaaacagataattgcacaaccactttcttcaatcttttgatgaatagccagccatttctgatctgagtttatcccccgaacattccaacacaggatattgcaatttctatttcgtgaggttgtattcatttgggcaaacaaatttatttaggaagcagggaagtaacacatgtacttcataagaaactaaccataaagatatgatgtttttcatggagctgccagtcatcactcagaaccataaagagaatctaccctgtgacaaagaaatagtcttggcccaataaaacacaaaagacccataaagttgaggataacaaccctgataaggaccagggcaagaaggctaagcatagccaaaacagaatttaaactaatcattcttgcgctggaggagcttgtcttcagccacttcctcaggaagcatgccacatttctccacgcctattttttgcagctgggccactgggatggctggtggaagatggttggacctgtcctccttgctgggcttgaaagctggcaccatcggcttcaccttggacttctttttagggacatcacaagttagatcaagtttctcccccttgtttgcaaaccttgggcttcttctcagaccctcaacagagagctgggcctgtttcttctgcttcctcactctcacaggcagggaaattatttctgtcgaggcagagctgtagggaagagctcttgcgacatttttttccagcaatagagattctttgacgcttagcaggactttgaatgcaccaagggagcacatagggaatgacaacccagttgatcttgacggtgttccatggaatcgtttgggtgatgcattggaacatagtggggttcacagccaacagaaggagtctgaatactccaaatgcaactgcataacagaacttttcagggaacctgaaaaaaggcagttcagggattggcaagctgtatgggactatctgaccagatggctgcttgatgatctgaacagaggatgaagattcaatcattgagtaatcattgaaagagagggacagctgtggttcaacttcatccagttgattctgattatcctgatccatgtcatcaattccaccattttcaccatcaccttcagggttggcttgttggagttgtaggtccagttgtaactgttgtatctggtcttgttggtcttggataacttcccaaatggctggggcatcttcatctccaggcagcatatcaacaaaattgcctgtaaacacatacgggtagaaagtccaggattcccctacacctccaagctctgcagtgtgccccatcacaattttttcaggcacttcatgagggacagtatatctaactttgacaagaaccctacccaagatcctgtccgtggaatgccagcgcataagctttccaaacttattcacaatttgctcaataatggaataggttcttagcctcaaaggaatacccaaaatgatgacccatccttctctattgtatggtctgtttcttctgttagcaagttgatcatgtgggataaaattggcttgcgcgaggttttgttgcatgatcggaccctcatcaaccatagcatctctgtgaaagacagactgaaattgaactatacaaagggccagggggtagcgttgcgccctaatgaccgaatgtgacagaaatgagtgacaaagtgaatgatctcattgatagtctggttcactaagtgctcaggaggttggggctcaatcagaacaacagcaaactcttctccaaggttctgagggatggactgaacagtgaaatctgaccttggtattctggcaatccatggggcttccacattggcgccaggaggaagaaagagctccggccgaagctcagcatcagtatggttcgccatgttctccgcccaggcaatgggagagaccaacaatggggtggtgggttttgggggaggaggattactgggaggaagcatgatggaagggcgaaaagacgggggagacgaggggtcctttccgagcaaagcaagattagtttccttgtcagagccctctcccagacgcaaatcacgaagcttctctcgccaatgggctttccgctttacttttttggcccaacaaaaccgactaaggtgcccatagttgtaacaggcccaacatcttatttgatttttacaagccgagactaaatgatcaggagagagacagcgggagcagatacccggatttgttccctgcaatcactgcaatcctgcataagccgtctccgaagaaatctaagatgtgagcttcacattgggaggatattttttcaaaaagttacgagatgttcatttgtcaatgagatgttttatttttaatattctaagttagtttgctcggatgttcatttggaataagctagttgataaatatttattaaatgatactctatttggatatttattaaatggaactctatttggttattcacgtgtgagatgcctttggttcagtgcacaaatattgcacctttggttcagtgcgattcttctttcagtccagcagggttgcattcattcccgaacctgaaatatgaagatttccgttcaaaaattggctccaacagagtccctagcgaagtatgtggtgatgtatttcctatagggtatacaatatatataatttttatccagaaaatatataaacgtgttcaagtaaaacaactggaataggatcctaatttcatcatccaggaccaaatttcagaaaccaagcagcaagcagtcaagttaggacacaggaggtagttcaattgtgtaattttctgaaaatggattaaatcgatctcttctgtatttctgtaatgtttctgaaaaagacatcttttatagttctaaagcatttcagcttatttgcctctgtacacatctaaaataaattaagtgcctcagtttcagagtgtaatgcatatgcagagatggccatattcaggaagacaggtttgatctgctataaaagagtatccatctcacatattcataatcaagctataaaagattatccatctcacagattcataatcctcaaaaagggttacttatgcactgattcagggttttatgctcttccatacagtgtgacagtgtgtgtacgtataatttggaaaaacaaagtgcaggtttcaggatgaatgcccaaatactgaagaccaaacatgtggttttgcaggattcagtttcccttaagtgaaatgtgtctcactaattaaccaggtgcttaacattcatacgtgcctcctgaataccagatcaaactcaagatagtaccctctgttatttgcatataaagatggaccgaggaggaagagaaggatatgctttctcctgcatggagggagaaggacgtaaatgtcatgcatagtttcatgtgtaaatgaagccacaataaatggagccgaaaatcacctttcagcctttggcactgttcaagacaaatcccacatgtgggcatcatggatatcaaaaaatgcctgcatgaacaaacaattttatcagtaaggttatttcgattttttgtcattaacgtgacaaactgagaccctgtttagatgggactaaaacttttaagtccctatcacatcggatatttggacactaattataaatattaaatgtagactattaataaaacccatccataatcttggactaattcgtgagacgaatctattgagcctaattaatccatgattagcctatgtgatgctacagtaaacattctctaattatggattaattaggcttaaaaaaattgtctcgtgaattagctttcatttatgtaattagttttgtaagtagtctatatttaatactctaaattagtgtctaaatacagggactaaagttaagtccctggatccaaacaccacctgaagagatgctgcaatatgtacatgtactatgaatgttacacacggtatgaaagacacaaatacatccaccatgaaaaaatagcgtaataactctgaacaaaactcagcaccaaaataaacttccattttatcaagtgggagtactctctcgacttccagggatttctatgagaagacaaaattgcaacctctgaaccaggaacagtaatatatgattcaacacaaattgtataagaaagtttagtagacaactttcctaatccaaacgcatgcaccagggaaaatacttaatatgcgcatcttgagaaaagattaaattaatccaataaaaaacaatgccattaatacaaaagatacaaagtttgtgaggcacaataaccttattggttttttgtgtgcaatgtctcacggaatggccttcgtctctttgatggagctccttttgccctaatctcatcaggatcacagaccctcttctctaatggctagttactagatgaaaagtgagttggcataggagcaaaatctccagccacgatgttctcatgggatgacgatcctttatccaaaatcccatttaagaaatccatcgctttttctgtctgctcagggttcctagcatcactacccagatttcggaggctacgaaaacgaaccatgtgttcagaccacacattaggatcggtattcctgtctgacctaaatgccgccattgctcccattgtccacctatccacgacacaacaacgagggatggtgtcaaaaccaaggaacttgagtacaacaaatatgtgtgagcaagggatgtcttcgcactccatcttccggcagtgacattccacaccttccaacgcctggcctttaaaagtaaccctcacttcatcccacacctcattatcgtccttcaaaccaacaacatacagtgacgaaccatcttgattagtcccacttatgacttcgagtccagcaattagccatatctgtgcacggactttcttgaacacgattgttgtgaatatacgggcagtgtctttctccaatgggtcggcgtctattctacaaaaagggatcgaattggtacacttagcgtccaactgagcctccttcttacgcagacgttgtatgcacaacttaacatgtttgactaagcacattagtgacatatttctcttcagaagggtgtgaagctttgagttcagtgactcactatgttggttgctgcgcatacccaacaagtatttcacatctgtataggtagcagcccacttctccctaagtcggtacatcagagcgatccattgtccatttcccgtgcctccattctccttaaaatcagcccaacgtctctcgaactcctcctcatccatactctcataaattaattttcttagctcatcgagttttggcttacgaaggtgacgactcatattctcctctatatgccaagtacacaatctatggtaagcacccggcattaccttactgatagcctttgccattgctaggtcgccatcggtaattaatgattttggatgcacttgacgtattgcctccaaaaaagtctcaaggagctaacagtaagagttgacagactcattggatagaattccgcacccaaaaattgttgtacttatatggtggttaactcctatgaaaggaatggaaggaagattgtacttgtttacccggtaagtgctatcgaaaataacaacaccaccaaaagcagcatagtctaaacgagattcaacatctgcccaaaacacattcctaagacgcccttcctcatctgtggtgtatttgaagaaaaattctggatcttcttcttgcttccttgttagatatttcaacacatcttcagcatcacgacccttgatattcttcatctcgtaccgagtaaagaaattataaaggtccttcatcacaaaactaacctcttccgactcatcgtggttattctccataacctccatgatttgaaagggcctaaggccactcatgcgaagctcgatcgcttgggctttcttagaatcagtcatcacacgatgaactcctaaaaaagcatcatggtcaggatttgcaagttcgagcgtatgttggttatcaaactccttaacaaaccacatccccttctgctcgttccgctcaatctcaagcttagctaagcaaccacagcgggtcagtgcccgtggctcccttttccactctgtcctctcaaagtgcttcaactccctgtactctttacatgagcatacgaattgcctccatataatctcaccgtccttccgcttcaagttgtttttcctcacactgaaacccttaccctttgcatagtctaaatagaatttgtaactttcctcctcgctttaaaaaaccacagtacccatcattttatactcttcctgatcctctaggctcacatagctcgaagtcattatgtcagacctcacctacggaaaagtaaaaaaaacaaacagaacaagcacccaaatataaccttacgtcctttatacctcataagaataaaaaaaaagaacaaccgtcgcctgcataaatacattgccaatccaaagaaaacacgggaaattcacattaggcaattcagttactgtaggactgcatataatatctgaggttcataacagggcagagtaaggatgctgattctataaataatctaaatgattacaagcttacttgcatccagcgcttggcactcaacatctaagtctccaaggtaaaatgggtccacctagtactgtaatacaatccttttaagtctgcacttttggggaaaaacatttgtttgggaaaagacaaatcatgattgtttaatttatttttcactattgttttgtgggagtgggtgggtagttcacaatttcatctatccagttcaatcagtgcaccttcacattcagaattcaaatgggtttgagaaagttctacaaatatgtcttaataaattcacagataaaagaaaacatcttttacaaaaactgcaagaaataatttcatcgcaagtgtacttctgaaatacatgaatttctcaagtgatttaaagtgcattgtgttgccaaaaaaatatattagctaaaacaaaattaaaccaagacatgacacattaattgtcaccttgttttcttgtgcagaacaaaaaccaaattccacttttgttgggacctaactacacaaactgttggtacatagaaagcttgcccaaaattaaagattgaccagtggaagtaatagatgaagaagagtacctcactaaacacaggatgacaggaacgtgtgacttcttcccagcatcgtcaagcagcacctgtagtgatcaacccctgcaaggcatggagcaaaattgaatcacacctgtagtgatcaacacatgcactaataaattaatacaatgcactactactagtactgatgaactagctggaaatgctggatgcattaaccagttgacaaggcaagcatttgggagaaaagatcaaagatcaattgcacaagatatgatttaacttgccacctttgctgaggtttaatgctagacttatcagtaacacatcaattgctgcaaactgttttgagtggaatttgaagtgacaggtgtatttcatttgcagctcgagaccaaaattattgttcagttttctttcaaaaaaatattgttgttcagtttcatcgtttatgcttacaactcaacatacaaaatcgattaaatatatctcctattcaatttaacatcagctagtgtagattctctagtatagttatccatttacaagcaagttgatgcatttatagaggaaaaattcagacaagttcaccactgagtagaggaaggggaacagaaagtcaggatgggggtgggatgggaggagtggatacctgatgatttcgccgcgcccagctgctggcagcgccgccgcctgcgtcggacagatgcgacgcgccgcgccaccggccgcgacgccgcctgccgggaggaatacccgccgggcgcacagccgcctgccggtgcctgcctccgaccagatgtgaaccgaagggggagggtggagagggcggggccgacggacggcgacggagggggcgagggagatgtaaggcgatggagggagcggagacggcggcgagggtgggcagggcgggggaggcggacggcgacggaggggagcggagaaggcgacgcaggcggaggagacggccggcaactaaggaggcggacaaggcggcgacggcgagcgataaggacggcgacgaaggcaaggcggcgaggccaggggaggaatagcgcgacagagtccacacctgcaatgcgaaccgatgcgaacatcccataccaaaattacccataaaggatattaggagattacttaactaccctttaaaataaactatacagattaattctactcggagtagaatacttcaagtatattgcaccggagcatcgctgaattttaaaaggctgcatatatccgattggatgtagagtccgggtaaaaaaacccttctctaaaaaaaaatacagctgatttattaaccttgcaattttcatttggagagctataaatcgaaaccttaaaagagttgaacaacctcctagtagccaagtaattcatgcaagaaagcaaagagatgtatcttacaactgattggctcagtgacgatggaagcatggtggtgtgagtggtagcgagagtacagggcatgatggtgcagtgcacgatggaaccagtaggatagaaactcaaccgggccagcgtgcatcaggaccattacaagggcgccgtctcttctccttagtggcattccttgcccgagtggcatcaacaggaggactaggtattccaagtggctgttaagatgaaggtatcatccctgcaaaacaaaattaattttcttggtttagatttttactgaccatttgtctgaactcaaaagaattaaagcatacacgaacttggcatgtccatataaaaaatcatatatagagatagaactagaggagattttgcaggtgagatacatatataccagttgttctcacgatccactttgctcgaattcaataccacgttctacaatccggcgccgattgccacgggcatccatgagccgggagatggttagccagacctggctatggagaatccttagcaacatgaaaggaagcacactgaggtaggccacatctttctctcccaacttcttggcagtggccattttgtggcatccgtgaagcacccatggagccaggggcggagctagagcgaaacaacaggtggtgccccttgcttaatttactctattttagattgagtttaagctaatacggctgtctaagtttgtattgaggggtgcatacatggtgaaaatagatgaggtagagctaaaaaattttcttgaccggattcctgggcaccctgcattagcacatgcatagacagcatccacgcatgtttatttcgtttatgctcatcttagcatagaatcattttttctctctctacgtaaattcatgtactggttgctaatgaatttgaaaaatcactagcagatcatttgaaatggaaaattatgtgcagaccatatgtactcccgagaacattgttacctttaggtttccaagcttttgccatggcgattcagtacaaaaggccaggatttgtagccatttttctctattgcctttgaaggcttgcggcttaagtgttctcgatctactagtactactgaaggggctgctgctacagcgcatgattgctcaaagcagtaagccggcaagctctatatataacatttcgtttatatagcaccagataggtaggaggatctacgattctttacccatggaccttattaacaaatcaggtatgaagaacgaagtacaaaccagccccaataatttagatacacaaactaacaaattcaatgcactagtattgaaacaatttctccagacatccaaaagagatttccgcgtgcgggcctccggcccgtctgctcggaagtgtccgcaaaaatcacaatttttccatgcgggtggcgcacccacatgcaaaaataaaatccattggtgcttatgtcgtccgaacgcaataacaaaaaacagaaaaaaaaaagaaatcgcaaaaaataaaaatgcgcgcccacacggacccgtgggctgctggatccgggcgggaccgtccacccgccgcacgccctccaccggagggctcctcctaccaccgccgtcgggctcctcccgccgctgccgccatgctcctctcgccaccgccgccagatccacgcaggggacagctatgcacccctcgccgtcttcgactctcttcggtcaacgttggctctgtggccgcttctctaccaccatgcgccaccggccgactaccaccggctgctgcgcgcccaccggctgttgccacttgcccgccgtctcttaatgctaaaatttggtaagccccaaagtcatcatcggcctagagccagtatcagcttcacagtcctgaaatcgaccgatggatattatgaaatgctactagttggattcttgatggattcggtcaaagaagtttatctagaagagatcgtgttcaaggaggacgtgtcttggcagtttatctattaattaggcagatttagttagttttcttttatttttagaaaagtgtattcagcattcgatcaggacttgtgtttttcctttcatcttaaggaaaatttgaattgtgtccaatatagactagcatctacctatggctataaatatatactcatgaggtccttgtaatttatctctcgatcaacaagttgggttgcatcggcttcgatctccgatgagggttaaggcttgttatggctgtttgtatcgacgaggctagggccacgacactctaacattgttgatgtaaacacctatcttagttaatctaagtcgatgtctcaatttattttgttggtgatagttaaattgcttcatcgatctagattagctaaagtattcaccactctaaaaatcagtcaaaagcttgattatttagactttatgcttcttttcatacttagtgttgcatcaattgagtttgacctattaagttgtgcttagaataaaaaaatactaacatgtgtttgattggcaatacgggtttatcgggatttcagccgatgagttatctggatgttgcatcggcttacaagtattacatacaagttggttttaaccgattgcatcaaaggtttcactgattatctaatcttttggatttaatgtcatcggaagaccaaccgatgtatgcttaaccttcggatcaaacaattattctattgtatcattattgaccgattggtttctattggattatagtattatttattatattattaccagccgattgtctttatatcattatttacttaagtgtcagaatcttcattggacatatatcccattgttcaaaaccctattgacatcggcgggtatcggcatcggctagcattgctatatcggcttattggctaattggctttttgttcttcaacttatacatcttgtcagttgcaggatcaaactgactggcacgttcgcatctcataaatattttggacctgtattggaactaagcagatctctcaggccgttgtattcgttgacttagtttgtgtcaacatagatctggcaccatcgaccgagcgtggatttttcatcaacactgccgcgtgcccgccggccagccgctgcctcccgagaggggaatcgagtgacagagaggagagaaagttctctcctaggagagagagaggggggaatttgagagagaggagtatgaggagaggaggtgagaaaaagaggagaggagataaggatgacttgaaaaagaattgtagcgctaagagggaaagagaaggtaattcagacttttgggcggaccttcaagaggtcttcacgcgaaaataccttttcctgtgtggccgtttaagatgctagtgtgaaaaatagccaaattttcacatacggctcattaagaggtctttctgcgttaatatatttttgcatacggaccttttaaggagccgtatgtgaaaatgtgggttaatttttgcagatgcgaaaacttatggtcggttctacaatatatcaaggtgcttgttaagaaaatcatttgtgtggagtagtgacggtggcagtgggggaagattaatttgcatcgttttcacgcaatcgatgatctttaatttagtcaatgcatcattaataatctatggatagggttgacgcagagggagatatatcattggcaggtatcaaatcgtagcaatcagtttaaaacagtaagagcaatctagaggagaaagggaagttcagccgctttagatagctgctgctacctaattaatgatggggggcatggccggccgcattgccgacgaagcgccccatgccacaggaagccggtgtcactagaaaagatacttctacatgtgacggcttctaatatgtctagaaatagcagcccatcacatgaaagtcatctcaatcggatcaaaaagtacccgattgagttatggtcgcacatacatattagatgggcataaaacttaagcctgtcatggataacacctatcagtgacgagccgtagtttagacccgattgtgataacattccatatctcaaacgggcctaaagttacggtccgtcacagatgaccatcatctgtgacgggtaccaactttagacccgattgagataacattccatatctcaaacgggcctcaagtgacagatgaccattatccgtgacgtgcaccaacttgagacctgtttgagataacaactaggcccgtcacagatgactcgtcagtgacgggctatatactaatgcccgattgagatgacttaatctctatcgggcattaactaaagcccatcaccgatgagtatttttttatttttcatgtgaaatgtttatatttgtaagttgaactatagcaaaataattaagtgcagtataataattcattttatgagtaaaagtaattttacgggtagtaaatgatttgaaatggaaaaaatgtcaacaacaaagttgtataacttatcaagatttacaatttttagtttgttcatttttctatataacattttttgaataatttgaatttgaatttaaatttgaaaatttgacaacttcaaacaatattttcaaatactaaaatgatttcaattgaaaatgtcatcaacaacaaagttgaataactcatcaagatctaaaacttttatttttgttatttcttcattcaacaaaatgttagtaacattattcccaaattttacatatgtgttataatttataaaccagataagagatatgtcatgtttgtgaacaatgttactatgcactttgtcgtatgtagaaatgaccaaaataaaagttttagatcttgatgagttattcaactttgttctcgatgactttttcagttgatatcatttagtatttgaaaatgttgtttgaagttgtcatatttttaaattcaaattcaaactgttcaaaaaatgttatatagaaaaatgaccaagttgttgatgactttttcaattgaagtcgttcactgatctaaaattctatttgaatttctcaaactttgaattttgaatttcaaattgtttaaatagagtcagatggagaaatgacccagataaaaattttgcacctcgatgagttctacaactttggttttggtgacttttccaattgaaatcattttataaccccaatttttgtttgaagttgtcaaattttgaaaattcaaaatttgaattgttcaaatgaatttatttgtacaaaggaccaatacaatagttgtagatatcaatgagttatacaatgggggatgtgaatgaatgtatatgaatggggaatgttggggtgtgacattctcgcctagggcttgataggattaatagaataatcataccaacatgttacagctatattttcggaagccgatcttcaaataactttgatgttaagcgttctaggcctggagcagttgagtttcgcgatgggtgaccgatcgggatgttcttcttgggtgcacacgagtgaggacaaaaaagagtttcgggatgggtgaccgatcgggatgttcttcctgggtgcacacgagtgaggacaaaaaagagtttcgggatgggtgaccgatcgggatgttcttcttgggtgcacacgaatgaggacaaaaaagacccgcctgggagaggcgggacggcatggcatggctaggcaaaaaataaaatttagtttttttgattatactcatctggcatggcatggctagccaaaaaataaaatttatttcttttcgattatactcatatgtgacgggcattaacttatgcccgattaagatgaggatcatatgtgacgggctatagttaatgcccgtcacatatgactaatttgtgacgggctatagttaatgctcatcacagataagggtcatctgtgactgacgggcgctagttgtggcccaattaagatagatcatctatgacgggctatagtttgactggttatctgggtcaaagctatctgtgacgggctttaattaggggttgattgagatagattcatccgtgacggtcgtttgcccgattgagataaatcttcacatctgtgacttctagcctgtgacggacgccatgcccgattgagatggggcttaccgccctattgagttgatggtatccgttctagtgtgtctccacctctgtgatcgccggcctgcggtgagccagtgaccatgcatggacaacgacggagaaagcggctggaatagcttaggtgcggtagccccaactacaactcccaaacagagccgatgaagccgctctccggggccccaactcccaaattaagtagattgtaggcaaaaaaaaaatggaattaactcaactaactggatggccctggcgccgatccaaaattatattttacttaaaatttattaaatagctatctctggttgtaaagacttagaaagaccaaactttatcatccctatgtttttaattttatagtttttaaaagttacaacagttgatacctcttacttctatcctctttctttatttgcttgttcaatctaccactatttttatttattctccatggaacctttaaaaattggaccttatattttttagaatttatctcgttgggttttatttttataatttttagaagtccgtcaaacgctacaactatactcctctacggctcgttcactacgtcctctctttattgtgattgggattttaaaaatcgaccataattatcgtttgggtttatttttttttactttctataagtcctgtcaaaccatcaacggctttatcactgtactcctctatggcttgttcgttgcctccctttttttattgtcattgagattttaaaatcgaacatgattatcattgggtttgttttttttattcttttagaaatccaggaacctttaaaaattggacattgtagtttctggagtttattgtctcgttaggtttatttatataatttctacaagtctcgtcaaacgctgccactatactcttctacaacccgtttgctgcctcatttctttattgtcaatgggattttcaaaattgaacataattattgtttgggatcatttttctactttttagaagccctgccaaacaattagcggcttcactactgtactcctctacggctcacccgttgcctcccctctttactgtcattcggactttaaactcaagcgtgattattattagggtctatttttttttttactttttagaagtcccacacacaaccatgaccgtgttgcttaacggcttatctgtcgtcactccttttaatcatcattgggattctatttagggttttgttaatagtttttagatgtcccatcagccatcaccactctactcctttatagacccgttgcttctcccatctttattgtcatatgtcatctgtgttctagataaaatatttttttttgaaaattccatatttttcatccaatatttttaatatgtaaattatattcctacttgaactcttataattatttttctatttttgaaatttattttattttttatttgtaattttaatttatctcgtcatctgttctagatagtctcttcttttactagtctttattttctattacaaattttagttatttataaattgtattcctcattgaaatcctattttttattctattttgtattttatttttattttattttgaattttaattaatcttgtattgtgttatatatggactattcttttaatatttattgtatttatttcgaatttcagttgttttaaaattgtattcctaattgaactctcttttttatttttcttagtttcgattttattttatttttatttataattttaattaatctcgtattatgttcttatgtggactcttctatcaaattactaattttaaattccaaatttcagttatttttaaattgtattcgtacttaaactcttattttcttcttataatttctaattttattatttctttattttttattctaaattttaattaatcttgaatatggggttattatttggactctttttgcaatattgcttatttttaattccgaatttaagttatttttaagttttattttttacttaactcttctttttgatttttcccttctagttttgggttttattttattttttcttccgaattttaagattcttatacgtactcttcctccaatattgcctattgttaatcccgaatttttgttatttctaaactgtgtttctatatagactctctttttctttttcttcaattaatgttggaatttctagcatcctcaaatttgcctattgttatattgttaagatgttttaataatataatgaattcgtagagttacaagtctttgcacaattcgcctctgctatcaatactataaacctctctcgagcaccttcttgggaagcttttttttttctgagtaaacgtttgataaaccacttacaaaaattttaagactaccattcaaaatagtattatgggtaaacactccaaatcatttgttcatttattatgtactgtctatatccgtaataactacaccctagcactttggaaggtaaattattggagaataaaaatgactttaataccctttcaataaatgatgtggctaggaataagatggaataagctagactgatctactatgaaggtttttttattttttttgacgagaaacagtaggagaggctcctactgtgaaggtttggtaaacaacttattaaaattttaagattatcctgtgaaacaatattatgggcaaacaggattatttcttagagtattatctaacatatatttgtctagtaatacttgaaaaataatctccagcccatagctcattttgatttaaatatatgttgcctcatttattctattaggaacctctttgaagcattataaaaaaacgattagcagttcaggaaacgtccgtgttgaaaatgaagaagtagaagatgggaaagagaagtatacaacacaaccttaggttttccagacattaagttgttgtttttggaatatagtgtttgatcattcatgctattcaaaccctatttaagtttatttattttgttgtggtaggtttcatcactaagatactttaatcaagcttaggtttcttgcatagtcgcacttatttttttaataatatgaattttaaacatcatgtaaaaaaatgaacagctagcatcacatatttaaaaatagggagtagatgatttggtggagaggcatgcggtgggatgaaaaatagggggtgcatacaggaggaaagatatatgttgcttaggctcctttattatttaggcttatgcttttatgatgagttttttttatgattttatggtttataagctggtagctgctttgaatcatcaaatggaagggttgagttctaactttaatttacactagatgatactccgcgtgttgcggcggacaattcgtgcgtgcattgcagttataaaatttcaatgtataggaatgagaaatattatggacctgtaaaagcatctcacatatatatgaaaaatgaaatacttccttgtagtggtttcttatagcatactatattaagtggtcaatgaatgttgagttatgtcataatcaatgagaaatgataactgtcgatatttaatgtctatttaatgaagcttggaaatgatccaataactcttatttagcgggtgatgtggctcaatgcatgtttagtttttggtgccaactatatactccttccggttctataattattgacattttagacaaggttgaggtcaaacttttataactttaaccatcaataacataaaaaatatttagtttaaagaaactagaacaatatatatagatttgtctttcaaaacactataataaaagtaaacatgcatttatttattgtgtatattataatagaaaaataaggtcaaaagtatattttgtaggccgtgtcattgtccaaaatatcaattaaaatgaaaccggagtcccaattgatggtggttgtttcctctaatttaattgctcatgacaaagcgcacgtataccacagtcccacttctgatcgcacgttggcactgagcactgggaagccgttggggtactgaggaacgaagccgtgtgaaatcccaatccacgcgcgacatatatatcctgtatgtcgatcgtgcatcgattggagagatgtgcgggagtgaagatgagtctagctaggctggtccatcaatttgggccttctttctcgtagattaaagaagtttcaaaggtgtatatttgatgtcgacattgatcaaatagctaatataatgttgatgacgtggtgaattgagtagtgagtaccaactatatatgagaaaaatagctaataaaacctaatttcataattagactttcattagatgtgtggtggcttggggggtaagatgagaacatacaaatggaggaatgcacgctatgcacacaaacttactgtgcatactccatacacaccaactagcaatgtcacagaaatttgtataaaaaattagacacatactttcaataatattacacctatgtttgaaatattatcttcaaattcattatatattagtcgcaaaaaagataaaattctgatagatttttactctaacagatttttcattttttgtgacggctaaaatataatgaatttgaatatgagactttgcacatatgtgtaataatattatgattacatgtccatttcttctagaattattttgtaatatttgttagttagtgtgcatcggaagtttttgtacataggatatgttcccatataaatgatagtttgtccatagaaaacagtataataaataatttagaatcatattttgtgcttcgaataaccatcatgtggccatggatctcatttatttaggttcaatatagacaaaaagttttccagacttttctaagtaaaatataaatgtaaaaaatataaagtaaaatttcagctatgttttatgcatttgaattttaaaattcattactgggtaatattattttaaaaaatattagttatagattggacaaattataacctacataaatttggtctaaagtgaaataatgttagagtttctcttaaaatataattttattctattttaagcattgtttttgtatgcagttataattatcttgcttctataaaatatttagaaaaaattgctacaggacatcattttttaatatttgccctagaatgccataaaaccttggtttcggctttgcatactaagcttttgtggtaattcgctaaaatatattctagcggtctaaccattacttttagctatctggctcaacatgagatgtaaaattgtggaaaggtttttctcggttgtagacaagaatgttgccaatatgtgttcctatggaccaactgggagctttacgcatttcgagttatagttgcattaaatccgactggctggtttgtggccaccggcgaggctaatggcacgaatttctactcaatcggcgccaactgggaagagcggaggaggccagtggcacatgaggaggaggtcggtagcgactttgactgaccttgtacatgatattttatttgcgagtacatgtgagacgcatgtaagcactcaaacgcacatatcacattatattcatgttcatatacacccttatgagtgtgtgctaacacatctaaaagaattggaggtctagaaacacgtaacatgggtacacgttttaccactgagcacacctatgtgtgcatgaactttgcaatattacatcactgggaactatgagtactcaggccatgtataggattttaacctagacgagcaggttccaccacaaagaccctaaccaaccttttgttgcacaaaatttgcttagatgagcccgatacccataggtggagcgagaaacaattaaaactagttgatatcccgcgtgtttgtgacatctcggcccagggcttaataggattaagagaatactcataccaacaagttgtaattttttttccggaagcccatctccaaagaactctaagattaagcgtgcttggcatggagcaattttgagatgggtgaccgatcgggaaattcttcccgagtgcgcccgagtgaggataaagtgtgcaacacacgtatcgacgaggatgtcaatctctcttaagggggagaatactcataccaacaagtctagtctgtgagggcagtctatgacctggtcacacagcacggacgtggccaaggagtggtcacacagcatggcacatgcgctggcattggacgcatggacgtggccaaggagtggtcacacagcatggcacatgcgctggcactggacacacggacgtggccaagagggaatgtttgtgtccaagagggaacgttcctgagttggggttgatcgacgaggacgtcgatctatcttaaggccttaattggatgaagagaatactcataccaacaagttgcaacttcttttccggaagccgatctccaaagaactctgaggttaagcgtgcttggcctagagcaattttgagataggtgactgatcgggaaattcttcctgagtgcgtagctgccggatataagtgggcctgtcttgggagaggcgggacgttgcagcgttgcagcgggcacactataaaatgttcttagtgcataaaattgatgcaaattggtcactgaatcagcattcaaagaaaaggagatttacactgttgtgatagaaatgcgcataaatgttcgtttgaacatatacaattgaatcaggaaagcaaccccaattaatggtacatggtattctagcgtgctgagctggtcgatttgctgaattgctgtgaagatatggtaggtgtaaaaatcaggattagcctcttggcaatatgatgaactgagtaagttcaaaactttataaaacataaatggtatctcaccttcagcagacttgaacctttaagcaaagctactagaactgcaactcaatcctaggaagtagcaacatggctgccttcatctcatcctcttgataaagctaggctacatgtaggccatatttatagcatctctaacctgtattctaagaaatatatatattttgaaaccaaattcatactgaaatttgtggtttgagcttgttaggtgtacaccacatttgagaaacgtggtgtactttgcccaacatccattgggtaagccctttgttttttatttcaatcaacagagctactggttaaatattttcaaattattaaaactttgcagaatatacattttaaaattattggaactttgcaagtgtaggatgcacgcatgagctatatttgaagcatgaaatgccaatgataggatatcgaaagaaaaggacgggtgcacgcagcatgaccaacaaaggataaggtaaaaaaaaaaacgcatgccagtaaagtttatctgctttgatgagagtcctttttgcttggaagactggtatgacaatcctcgcatttttccccatgtgctggaacatatattccttctatctattaaatccatagcacaatttgcataggtcacaagcagtataatcttcttttaagaaactaaaaaatagtcaatacataagtgtaggactaacaatagttgttccttctttaagttagcaaaaacaattcatcaaaaactttcagctcgatcctgcaagaggaaaatcgtaggcaatgctcaataagtaaacagaagcaattcacatatacataattgttatacaaattggaatacaattggaggatacataaacagatttgaaaactttagttacatgtagtatactaacctttcatgctatgattctcttcatctgctcaattcaattgggggatatgataggacatggttgactcgaaggatgagttgtgaggatggtgaaaggtatttgttgtatgttatgttgcagaagggattgaaagaggctaatgaaggtaataatgtggatcctggtgatctaatagattgtgacagtttctgctgtaattgctgaaaaataatagtaataggggacggaaggaggaggcgaatggacaggaccaaggcgattatggtattgatagtttggggaataatgaatgaataagagaagggcatgaacgattctcacttggattgccgatgcggctagttgagccgaggggaaactgacggatccatggtggctgaaccggttgccctcccgaagcgtgcacggtgctggcgaatacgccgcatcccaaaccgccgcgtatgccaaaagggcggaagcatgtgcagggtgggttgggccaacagaaaaaaattgatgggaagctggcccaagatatcaacctcgttcatctggaaacacgcagaccaatccaacggctgaaaataaacaataatgtggcgtaacatggtgcaagttttatagcaataactcctctagtgggtaccaactatataggaagaagggatagtatggtagtgggtggcaatagtattagtttgagtaaatttgacaaaacaatagatctaaggacgtaaaccatagaactatagatttagcgcaaaatttatcataaaactttagatttaaggtgttgtgtcatcaaaccgcagattcagtgatgaggttatcatataactacataatttcaaatttagatcaacaaaaatattcttaaaaaagttaaaaaattgtagttatgtgatacaattgatgttaaatttgtagttagaaaaattccaaataccccctgaactttgggtcgaagtccgtctagcaccctaaacattaaaactggacatccaaccctttcaacttttcaataacgttcatattatctcctaaggtggttttggatgatagttttgcatgttttggaagttcaaacaaaataacttttaaataactaatataacatatttgcatatcatcaattgtaagtcatcaatttatacttatatagtgataccataatattaataaagtttagggggttgaatgtccggttttaaagttcagggcactaaactgacttccatccaaagtttagggggtgtttgaactttttttttcctttgtagttttgtgatgcaacgccataaagttgtaacttcatgaaaaattctctctttttttcatttctaaccagtagtgtagttatacacattcttaaatatgtagttttatgatgagaggtggagagtttttccttagttgtacacaagaatgttgctattatgtgttgacatggatcaaatgggtggtgcataactgatcaaaagttacgtatttcaagggataattgtgtcgaatccagttggcttgtatgtggcctctagtgaggctattggcatgactttctacttgatcggtgccagcttggaggagcagaggaggccagtggcacacgaggaagttggcagcaccatgcgcaactcagtgacagtgtgaaggagatcagcagtgccttgactggctctgtacaggatatttcaattgctttatgtacatgatgtttcatttgcaagtacatgtccgacacacataagcactcaaacgaacataccatattcatgtccatatacacccatccaagcatgttctaatgcacttctaaaaaatttagaggtctagctgcacgtagcacgggtacagattttaccacgaaacacacctatgccatgctatgtataggacattaacctagtgggcatgtttcaccacaagttcgccaaccgagcttaacttaagttggttgtatagaatttgcttcaatgagcccgctagccagtggcgaagcccaaaacattaaaaaaattatatattggagagtggaaatatcattggtgtctattttcaaaaaagtccaagcccctacttgcatcccccttatctctgcccttaccaccagcaaatctgcttcaatgaaatggtataggatcttagactcaacttagtggcaagtctagcttagtcttttctagcaaggatgattttcataagtttgcaaatcatgatagattatatttcttctatgcatgtactaattccttagcttgtgttgaacccaaccatagtgttggagatcggtactcctacaacagagaagagaagacccccccccctcccgagatttagccgaggggcaagtagagatcgagttcatatggtgtaaacactcaaacaaagaacacaagcaaatatataggtttatgctgctcgagagcgtaataccctacttctgtgtctagcactatgtagatgcaagaggtttacaatgttggttccttgtcaagctagggtttctttctctagtgaaaaagttccaaatgtccaagaaaaagtcccttctaattggcataacccctccttttatagtccaaggggggacctatagtgctgtcgtcacctaggtaatacccatgctacatcttgtcattgctcccctctgacatccttgaattaatgggggaattggtgcacgactgtatttgctatgccccaggctctctggttaaaggggcccagaatagctgcatcttgcttctctcgccatgtgctcgatcttgaaccaggtggcccaagccatatcacgttagagctactaccgttcttcccactttttgacaaagttatggatccaacgcatgtgtcacgcctggaaattcactagtaatttccgaacttatttgtgcataaaatccccgtctaggaatcagccgaggtacacaaactgacaatttaatatacaatccatcaaaataactaaagcaattaatacttactgaagaggcgcttagtcctcacaacaaagaaaactgcagcggaaaaataaaatctagcgaagctccggctccacccccataggcagctcaactcgggtataagtcaaacgtcttctccttctggatcatttttcttcaactgaggttgattgattattgcaaggcaagtcacacagatcccaaacacgattcctttgagcatgttgatcctatatttaaattctctatttatttcaactgtgcatttattttcgaatgtcaccgggtggtgtgaacctattcctttgttatggccaatttgcattgaatgccctattccttgataccttgggtaataaattgattagcttgaaccttatgtattggtttggttcagctaaatgctatatatatacttgcttagccatgcctagaaacattagttcattaatgggatgaatcctactacattattatttatggttatatttaggggcaatttcgtttctgcccctaatttgatgtctaatattgattttacccttattttttagggttttcgtttttaccctcattttttttaaccgaacgcttgttttgcccttaccttggatgataaaattaacggtgttaagtaattgacaaaatgacatttataccctctcatgtatgttcattaattgtgtttttgccctcattttatacatatagctttgaaactttatttttggagtatatttaaaactagatgatgcacattgactaatataacaatttggaaaaattctgtatttgattgaattttgacaaaatttcagcattttgatagaacttaaacaaaattttggcaacattatgtaaaatgtaattatctgttctctttagatattagtcaatgtgcttcatttaattttaaatatactcacaaaaataaagttctaaagctacatgcataaaataggggcaaagatataattaatgaacagagatatgagagggtataaatgtccttttgctaattacttaacaccgttaacttaaccatccaaagtaggggcaaaacgatagttcggttcaaaaaagtgggggcaaaaacgaaaaccctaaaaagtaggggtaaaatcaatattagacaacaaagtagggttagaaacgaaattgtcccttatatttaatggtagctcacgatggttaatcgtgttatgataattaattgataattaaaacttgataatggtgggttgtgagcacatggttttgaaggtcgtgctcatgacaattaaggaccagtacgcgagctactgttgtgagacattaaccgtgccaaccacaagccagcgtgggcaacggctttaccttttgtatagtatggtacattgcggggcaccagactgtgaagcggcgagaagtccgtgggggtcactgggagtccacgcctctggttattgagggggtgattatgatccaggaatggtgcactgtggtggattgtgttgtgcaaggggtactgtcacagttcctatctgagatatcgtggtggtattgaggcgcatggtaacatgttgtggagctgtgtcttgtgggtacagtggtacatctctggccagagtaaaactattcgaatagccgtgcccgtggttatgggtgagttgagcaatgttttcgtgattagtctcatacctctcacaataattattgatgcaataattggtaataatttgcttagctcctggttcggagttagatctgtacagctcggtatggttgttcagaatggttgggcctgagcagcatgggcgtgtgttaacaaccaaatttggtaatatcggcatcgggaaagaagattagatcgaagcaaagtcggaggcggagatcgagttcggaaacatagcaggaatcggctggagtccagttcggctacgattaggatcggctgggtctgagttgggctaggtaagccgatgcagccgattccgacaatgcaacttgatgaatgacatcgggttgaattgaggtgcttcaaggtgattgctgcacatcgatagagtcctgagaaggcaattgtatctattaattaagatgttttatgtaatttccttagagatatgcttgggcaaaagtctgccgcaaagacttatggtatcttagagtttgttagagatagtagtcgtgtccgttatggacatatcttgtaattctcgggtataaatagacccgagccctatgtaacttttaacacacacgttcaatacaatttcggcgcatcgccaccctttttgctttagttttatttcgacgagttcttactttcgggttgagctacatcggtttcgatcttcaacaagaggtaaaacttgttatggcggcttgcgttttcgggattagtgcttccatctttatgacactctaatcttgtttatgtaattcgtcgagttatcatatatcctacataatccttggcaatatcgatatctgacctataatcggctaacatccgtcaatagaaggcagccgattaggttaaataccgatgtttacttagattatataggatatctaccactctatgacacatccaacagcttgattgtctagatattgtcctccttttcatacttatagctgcatcagttaagtttgatattatgagttgtgattagaatctcaatctctagcccgcttattggttgctgattagggtagtatcggactttcagccaatcttgcctgatttaactactttttatcctatatgcttgattgacatgttaaatctgccctttacgttaagatcttgctgcatttaagtatattaagcttttgtttagtatattctacttgctttaatatcttaatatagagtggtatcggagtattagccgatacatgctagatctatctgatcggctatgctatgaacgtatatagtctcattattaatatatatttcgatctaagtgatttatactgcctcggcatggcgacggatctatcccaatcacttgatttaagtatatatcgatataaagattatatattggtaatatctgcagccgatcgagtagattcagtcctttcttatttattaatgactgccgatcgatgcatatacgacatcggctcaaagataaatgatatgtcatcggcacctcgccgatcggctatcatttatagatttaactgcgatttatttatcaaatcaactggcacgctcatacattcgaaggcgagctttggacctgcactggagttaagcagatctcccaggccttgtgttttctgtcaacacgcttttggcacacctggtgggacatttaagaagtcagccaacaattcttcctcatggccgagaaaccaccaccatccccagctagcccaggctctgttaaggaaaagatgctgaaattagggttggctgacgtcaatgaaggaaatgtcgtgccgatcgatccagaaaaattcacacctgagcagaagaaagagtttgaagcaatgttgcagcaagcacgggatcagtgcttgaactcattcatgcagacccgcaaggggacacttgttcagaagtacaaaataaaagtggttgctgatgatccggggaccagttcttctaaggatggagatgggaaacaagctccagacggctcggctcagctgagtaacaaaagtgctaccgacagctctctaggaaatcaaggtgacaattctcaaggagtccatggagtgcaaggtgacggggtgcatggagttcaaggtggtggtgcccgagggttgcaaggaggggatcttaatcagaatagtgatacgacactgtaacatacccaaaattctaggacttaaaaatttgttgtcaaaattgttagaagataacttctccaattttgagagccaaaaatttccgttttaatttaggtgatgaccaacttaaaccattgcatgattaaaatttgagaacaaaataaaaccttttcattcccagcattagactagaaatgtcatcaagcatttgagcatacatgtgcataatgcatgcctaggcttgagtccattgtgcatttggttttggtatcgcttttcataatagatctcatgagcataaactaaaagggttaaaactactaaacaaaactatagttaatattgggtgataacatgtggacttaatattaaattctaatatcattttctcagcccaaaagaagtttaatgtaaaccctataatagtattagatgcaattatgaagtaggaacacatattcaaagaaaggttattctaattctttagaataatctatgcaagataaaatcatggaaaaatttatgtaaactatgtttagctcaagcaattcactataatattggtacaggttaataactaagtttaataccacaaattaatcagtcaaagcagacaactaaaataaatcaaattaaactttaatcggctaaagcgatacttcatccaaaagtatatttaactgcacataagtgaatatagaaaataatttattcaaatactagattatttatcatgcctaaatataatttttctagaatttttctcctctgtttaagcctcctaaaaattcaatctagatttctaatagcccttctttgtttaatttctgtgagcaatctacccattatttttaagtgcaaccaaagaaaatggaatctacgtgtaatcatttacctccagtaaaatcaacactaattaatttgatcgacacattaaattatggagttacaaatttagaggagaaaataattccgaaaattaatctaaaaatcaagtttacccagtcttctacccatatctctctccctagcctagtttccatcgagttggccccacttgtcagtgccttaggctagctttagccctgtccatcacttcctccactgctccagccgagagagggagagattgagtgagccgacgcgtggccacaacgtgtcgtcgatctcggtttcccttttctcgctctctactcctcccagacgcgtcgccattctccattcaacactcagagctaaagaaaccgagggaggaggttctctgcctctccatcgctccaaaccttgccgccggccatggagacgacgaccatcgccatctccatttgagtcaaggtcacctccatctctttcgcgttcccatctctccacacaatgccgagcatttcctcttttgacctaaacccctctcgtgcagtgcatcgccgggaacgcaagccacgccgacaacgccctggagcacgcaccggagcgccgccgcttcaaccatcgtcgtcgtccggccattctcgaccacctcggagcaagccgctgcgccatcgtcatcgcctcaacctcctcttcaatacgcctcaagaaccccagctggagatgtgaaggactcggagaacgcatcttttcttcaccggcgccaatctagaatcgcctccgccgtcatcgtcgattaccgctgcctcggtgagccattgttcgattcctcgcacatacaccatctccttgacctcacaaaccttgtgcatgcttgcttgtagcagctcatgcgagccgtcgtcgttcacccgaggaggagtgccgtcgccgagccgttccacaagtcaccactaccgccaagaccttgacaaccctagctcgacccatggtgagcattctgaaggctagaagaccacatgcatgcatcctttttgttcggaatcgacttccatccacacatgcgctttcaccccaagaaccaccgccgctcacactcgccattggcgctactccaatgtcccctaaccaagaaaactagaggaatggaatcgcaagaacatgctcttcatttatcttttaaccccaactccaaccgagccaccaatcgccgccggtgaacccgggatcgagctcagccatggctgctctgcctctgtgcgtgtgaaaaaggagtcagggacttcattttgagaatttaaataactataaggttcattacgtaatgttcccaatcaatgacatatggacctaggactgcgggttgagttcctgaaaccctaggggcctttttgcatattggcctgatactgacaggagaaccccatgagtttaaaatctgaaaaaaaatgtaaaaagataatactaaaagttttgtattttcaacaggaaagcatgtaaacttataaaatccataacaaattgaaaacaactcattttagaaaatccataacaaattgaaaacaactcattttagagtaaatcaaatttctgtgaactcaccaaatcatgaactttagagttattgcataaaactacattcactgtacaaactttgtctctaaaattggtctaagataaatcatacataaagcatacacaaacttataaaatacatagaaaattcatctcaactcattttgaaacaaactcaaaaaaactgcagattcatcatcatgcactctctgattaggtgaaataaaagtaattacttactttgcatcaaatgcctctaaaactattatctctataatgattagttttagataagctaaactttagaaattcatgtagaacccaatttagcttcaatttgaataaacttaagttctgtaggatcaccaaaacacgtatttccatgttatgaaataagattatatacttactgtgtgtagtaaaagtctctaaatattcataaaaggatttactaacatagagcaacctttaatttggcaaaacttgtagaaaattcatttttagtccaaatgaaatgaacaaagtttccatagaactagcaaatagttatcttcaacatagtaaaataaaatttggcaccttttgtagagaacatagatcaaaaccttaacttagtgaaataagaatttaaacacatagtgttgtttaagtaatacataaacatgtataagtatatatacactttaggtctaattaaacctaaacaaaaacttgattgaccagtaaagccatagttccatcctcatccactaaaacttagaagaacttagctcatatgacaatttctaggttaatataatatattgctagtttagattagagcatctctagcgtataaaatatgaaccatagtagtaaagaccataaacatgtgaaataaaaatgttttagttaaccaaattagtccttttattcaacttaaacaggaagtagcatgttctgaacctacaaattgagagtcatgcacatataaaacactatatgcctaaaacacgttgtaacttgtaaaatctataagaaaatcattataactccaaaaattgtgaaaccaaaggtgttagtcttagaaaacacatctccacactcctgtcaagtctaatataatagaaatcacttgacaaaagtattttataacactacctaagactatactactataaaccgataaaacttctaaaaattcataactccctaatggaataagataaaataaaaattctttcacctaaattcattttagatcagtaccaaaccactgtgcataaataatgcattttagagcattttggatttttagctctttcggtgtttaattgcatatcgtgtcctttatctagataattgcataatcggtgaaggagtggattaggtgctaacatttctctgatcaaggcaagttttctcctcccatcctttgaacacattgaatcccatgatttgaggaatgaaaatgtttgtttgcaaagctgcatgtgaacttagattatatcggtatttaaaattgggttatggtagttatgacctatttgctgcataccccaccttgaataattgatcctcttgctgtttgaacccctagaaatggttagagtacactctttgtgctcaaatgggtttatatatgctctatttgtaactacttgcttagccatgcttagaactatgcaaatgctcattccatctataattaaaatatgattttgatatatgaacctttgctggaataaaatgaatatgatgggtatttgcgaactaaaatgtgtaaaatgtgattttatacttgggcggcaagtggtgtgcatatggtgttagttgcataccgatagggggagtgtttgcccaagtccataaggaccgaacttgtgtcacccatttaaagttattcgtacatccacatgtgctagtatgggatggcctaagctgagtaatctatttaggactagccttgcattctggtaggccggtgtgtatgagttcgtataattcagaggagcttcctatttaccccgacgtggtagtttaggtgactaagtgtgtccaatacaacggtattgtgccacgtggtgggttcctgtcgtgtccgccatcacggcgttaagtttaaggcgtgggcccgtcacttaacggttctaggtatattccaaagtatgcctaggatggaggaacacgtatcgtgctggtgcaaggctaggctctaagtagtgtaaaggcttcgttatgacctctagatcacattcaacatgaagagtgtggtggagtcttgcaaactcaaaacaaactagagagttcatatcatgtgggtaaagttgtacaaactctgcagagttctttaaactaatcgattagccgtgctcacggtcatgagcgctttggtgatgtgtcatgtgtatagactatgttttaaaaatgtgatcatgtgacattggtttgaaatggataaatgtgttgagttgtgtgtgtggtgatacattatgacttattgttaagtatggcaataagagattgattatgatggaattatgaagaagttaataatgaaacttaaaacttgttttgttaattgaagcatcaacttctttacaaaagaattgcgaaacaaaacttgctttatgctgaacatgaactacatattgccttcctttgaatatatgccttacatgtagtatggtaggattgacttgtgcttgccagtacattaacttgtttaatgtactgactcttgctgttgatataaccttttgtttgcaggtttagacttagtctttgaatgatgcgggtcctgattgcttcttctaggatgagaacttaatggggtaaacccctagtcggtgtgcttgtgattgggtagtcaagcttccattgttctctaataagcctatttggccggtcggcctatgtaattattaagttgttgtaagtcttaagtttctttcatcttagttgtgtttgctatgtataatcatgcttaagatgaaagtgtgaatctagtgcacatcctgggaactagattcacatgagtatgagttaggaatatttgagaggttgtagatctttagccatttttgtcaagtctcctgaatgtgtaacgcatctggtcgctgccttcgagtggtttgacgggcacatctcaggctgaagttgactggcaggctaagggcccagcaatgtctccaatattcctctctcgaggcgtcggatgtttcattatgcttgttggatgacttgaattattcacttcatctctcaaatataatggaagatccggagagcctacgacagacacaaggttttttcagtaatttccaagatcgggtcgactacgctgtgcatcatgttttgatcaatcaatctggggtgttagtcaagaccttatcaaacatgatgaagtccatagccgatggttcaatagctgagcatcaggctgcaggcccggtttatttgcaaggaggtgtctttccaaattatcggtctttgattaccgatgttcagccatcaactcaggcggttccctctgttgcaccaacatctcagccgaaggcactggcgtcaattcccctacctgttccgtcagcaatggcgccaggccagccagtgaaccctcagttgttaatgagagagcagccacagcatggtgggcaggttgcgaatcggctgacccaagatcaggttgctgccacgtttctgccgcctcaacctattgttgatccaatacagcagcatccgattcagcagacacccccaattcagcaggttgtgcaaccaatccagcaacaggtcatgcaaccagttcagcaaacaccaccaaggcagcagcctctgcagccgactcagcagacgctgttaagacagcaaatcgttcagccgatccagcgccaaggttcaataggtgcatcggccgggtttgcaacgcctggtggtcagcctgtgcaacaatttttaaatcaagttgtcccagaacacttggttcaccacgtacagccggatggcacagtaatacctcaagttgttcctgagcatttggtacgtaatatccagccgaaccttcataattactaaggggtaacttgaattaccaatatcaacctccttccctgcaagcccaatatcagccagggggattggctcaacctcagtttgcgcctcaatacggtcagttcgagcccgtgcagcaacagtcataaggggtagctcagcaacgaccgtgggctgatgtgattgctgacgtaatgagggaacaatttgggcttaaaccaaaagagacaggaagcttgtatcggcagccttaccctgagtggtttgagagagttcctcttcccaatcggttcaaagttccggacttcttcaaattttcaggacaagatggtgtgtcaacttatgagcacattagccgattcttagctcagtgtggtgaagcatcggctgtagacgctctgaaggttaggttattccggttatctttgtctggatcggcttttacttggttttcttctttgccgtatgggtcgatcaatagctgggccgatttggagaagcaattccacagctatttctacagtggggttcatgagatgaaattatctgacttgacagcgattaagcagcggcatgatgaacctgtgcacgagtatattcagagattcagggagatgaggaacaaatgctttagcttgagtttaactgatgcccagttagccgatttggcttttcagggtacgattgctccgattagggagaaattctcgtctgaggactttgatagcttgtcacatctgatacagaaagtaaccttgcatgagcataggtccgcagaagttaggaaaaactctaagaaggttaatcatgtttgtccgtacatgtatggatcggatgatgacgaggacgattctgaaatagctgcagccgagtgggtgaggagtaaaaaggtcataccatgccaatgggtaaaaagttctagaaaagaggagaagtatgattttgatattactaaagccgacaagatctttgatctgctactccgagagaagcaaattcaacttcctgctggtcatacaatcccatcggctgagaaattaggcaaaaagaagtattgcaaatggcataattttgggtcccattctactaacgattgcaaggtttttagacagcagatttaggtggccattgagggaggcaagattaggtttgatgattccagaaagccgatgaaggtcgatggtaatccttttcctgttaatatggtgcatacagctggccaaacagccgatagggcccgtgcaaggggttttccggtgaattcggctaagattatcaacaaatatcagaagaagtatgacaagcagcaggagaagcatcatgagaaatacgatgatggttttgatcctcattggggttgtgagttctttagattctgctggaatgaaggtatgaggttgccatctattgaaaactgccctgggtgcagtgatatcgtcgagaactcaagccgatcatatgataggggcaatcggctaaggcagacaagagtttctgttcatcaaagattgggtccagtaaatcaagatcatggccaaaaggaccatgtaatcaggaataatcaatggtgtccttctggtattttcacgaagaatcagaagagaagggttcaatgattgaggaacagggagcgccttcaagaggctgaacaagaaattaatcatcggctgaagaaagcaaagccaaggcaggagtggcgtgttaagaatcaggttcctgcagtcgatgatgttgcagcagttgaggcaaaaaggtaggcaaaagggaagagtgttgtgacggcaccggttaacatggtctttaccctgccagccgaattcgggatcgaccaagccaatgttgacgaggtggaagaggaatcgactaagttggttctgtcactagaacaggcagtgttcgagaaacccgaggggacagagaatcggcatcttaaaccattgtatataaacggctacgtcaatggaaagccgatgtctaaaatgatggttgatggtggggccacggtaaatttaatgccctatgctacgtttaggaagttgggtagaaatgccgaggatctcatcaagacaaacatggtgctcaaagattttggtggcaatccatcagaaaccaaaggtgttctaaatgtggagctgacagtcggcagtaagactattcctaccacgttttttgtcatcgatgggaaaggttcttacagcttgttgcttgggagggattagattcatgccaattgttgcattccttcaactatgcatcaatgtttgattcagtggcaaggcgacaaaatagagatcgtgccagccgacaagtcagttaatgttgccagtgctgatttagctctttgggagatggatagccttgattgtttatctggaaaagtctgggatagagattttctaaaagtgtccgattctgatatacagccaattgaagatggagaacccaagctattactttgagggcgtcgtggagggttcaagtgtctacactacggacacggtagatgatctcgatgacaagcatggtcaaggtttcatgtcggccgatgatttggaagaagtggacataggtccaggcgatcggcccaggccgacatttattagtaggaacttatctccagagtttagaaccaagctgatagagctcttaaaagagtttagagattgctgagcttgagagtattatgagatgcctggactcagccgatcgattgttgaacatcggctacctatcaaaccaggggttatgccacatcaataacctccgaggagatgcaaggccgacatgcttgaaccggtcaaggctgagattaaaagattatatgatgctggttttattcgtcctcgccgatatgctgagtgggtttctagtatagttcctgttatcaagaaaaacagcaaggtcagggtatgcattgatttccaaaatttgaataaggccaccccaaaagatgaatacccaataccagtagccgatcaactagttgatgctgcttcgggacataagattttgagttttatggacggaaacgcagaatacaatcaaatttttatggccgaagaagacattcataagataacttttaggtgtcctagtgcaatcggcttatttgaatgggttgtcatgactttcggcttgaagagtgctagagctacatatcaaagagccatgaattacatatatgacgatctaatcggctggttggttgaagtctacattgatgatgtggttgttaagtccaaagaaataaaggaccatatagcttatttgaggaaggttttcgagagaaccagaaaatatggtctgaggatgaatccgacaaaatgtgcttttggtgtatcggctggccagtttttgggatttcttgtccatgagagggggatcgaggtaactcaaaggagtgttaatgcgatcaagaagattcagcctccagagaataagacagaattacaagagatgatcggcaagattaattttgttagaaggtttatttctaatttgtctggaaggttagaaccttttacaccattgtttagattgaaagtcgatcaacagtttacttggggggcagagcagcaaaaggctttggacaatattaaggaatatcttagctctcctcctgttttgattcctccacagaaaggaataccgtttaggttatatttatcggctcggtcttgattcaggaattggaagggaaggaatgagttgtattctatctcagtcgtcggctcttgcatgctgaaactagatattcccctgtggagaagttatgcttgtgtttgtatttttcgtgtacaaggttgaggcattatctactgtccaacgagtgtactgttgtatgcaaggccgatgttgtcaagtacatgctatcggctccaatattgaaaggaagggttggaaagtggatatttttcttaaccgagtttgatcttcggtatgagtcgccgaaggcgattaagggacaagctatagctgattttattgtggaacatcgtgatgattcaatcggctctgttgaaatagtgccatggactttattctttgatggatcggtgtgttctcacggttgtggtatcggcctagttataatttcccctaggggggcatgtttcgagtttgcttatactattaaaccgtatgcgactaataatcaagctgagtatgaagcagtgctcaaagggttgcaattactcaaggaagttgaagccgataccattgaaatcatgggggattctttgctagtaatcagtcaattggcaggagagcatgaatgcaagaatgatacattaatggtttataatgagaagtgccaagaactaatgaaggagtttcggctggttactttaaagcaattctctcgagaacaaaatattgaagctaatgatttggcccaaggggcatcaggatataagccgatgatcaaagatgttaaggttgaaattgcagcaatgacagctgatgattggaggtatgatgtgcatcagtatttgtgtaatccgtctcaatcggcttctaggaaattgcgatataagggattaaagtatactctgttggatggtgagctatattatcggacgattgatagtgttacttaagtgtttgggtgccgatcaggctaaagatgcaatcggcgaagttcatgaaggaatttgtggtactcatcaatcggctcataagatgaagtggttacttcggcgtgcagggtatttttggccgacaatgctagaggattgtttcagatattatagggggtgtcaggattgtcagaagtttggggcaattcagcgagctccggcatcggctatgaatcctattattaagccatggccattccgaggttggggaattgatatgatcggtatgataaacccaccatcgagtaaaggacataagtttatattggtggcgactgattatttcaccaagtgggtggaggcgattcctttgaagaaagttgattctggggatgcaattcaattcgttcaagaacatataatctaccgttttggtattcctcaaactattacaactgatcaggggtcaatcttcgtgtctgacgagtttgttcagtttgccgatagcatgggtatcaaattattgaattcttcaccttattatgcacaagctaatgggcaagctgaggcgtctaataaaagtttgatcaaattaattaagcggaaaatttctgattatcctcggcagtggcatactcggttggccgaagcgttgtggtcttataggatggcttgtcatggatcgatccaagtccctccttgcaaatttgtttatgggcatgaggctgttttgcggtgggaggttagaatcggctctcgaagaacggaataacaaaacgatttaacagctgatgagtattacatccttatgtcacgattgcgagcccttgcaaaggttaccaaggataaggaacgtattgctcggcattataataagaaagtggtacctaaggatttttcggaaggagaacttgtatggaaattgattgtgccgattggtactcgtgatagtaaattcggcaagtggtcgccgaattgggaaggaccgttccaaatttataaggttgtgtctaaggaagcatatatgttgcaagggcttgatggtgaagtctatgggcgagtgcccaatggcaaatatttgaagaaatattacccaagtgtttgggttaacgcatgatcggctagtattgccgatgcatgacagccaatgtgtttgcatcgccttgagatggccgatattgttatatcgcccttagttgttttttcaagaggtaatcggttgtgatttgccgatgtacaatggccgatattgttatatcgcccttagttgtttttcatggtgtaatcggttgtgatttgtcgatgtacaatggtcaatattgttatatcgccgttagttgttttataattttatcaatgcttttgtcattgtaaaattaggggggcacatatatatcaaaatgcaagaatcaaaattcaagacaaaaatgcaatgcaaattttttgaggcaatttttttgagcgaattttaaaagtcatattaatcggcacaaaggattgtcaagacaataaagtactagagcatcttagctgattacaaaaaatttctgagtcctattacacaaagttattgagagaagtatcgctggatagccaaaatagccctttgcctgattttttctacttcttcaatagcttgggcatcttgagcatcagttccagagatgactttcagagacttggttaggtcagcaacattcttgatagccgatttgagccttgcttttattcttcaattgattttgggagatcggctagctttttgtgttctatatctagctcggcattgcattcttcaagttgcaccaagagctcaattttgtgagcttcgagccagtcaatattggatttgatcggaccttcagatagctgatcaagtttggttttttcttcatgcacaagctgccgattagcttggattgtggcctcaatctctttgcgatcacggcgttcggctagtcttagcttggctttttccagcttgaactgatgttgctcgagataagcggctggagttaggacatcggccagatcttcgggaatcagagcttgaacttcatgtagccttgtcctaattgacccacagtcaactaccaaattgtctaaagaagaggcttctagccgatgagaaatgtcttcaagtgtttttctcacatcatcgaataggggagctagggctttgcttgaagtgtcttcttctgcttcgtcaaggtaatctctgatgtcaaaagagaagagatcagctagtgcctgtagagacaatttcggaaagaataagagctgggtaaattatagccgatctaattgttgagacaaagggaaacttactggaatagcaggagcagctggttgttcttcctcttcgacgtgatgactccccacagctgatggagtttgatcacttgaagattgctgtacaggaggagaaggaggaggaggctgcgaaatagacaagtgttatatagaatcggttgagattgattaattaaaaggattaaggacatctttctggtggaaccgatttaacaattgttgctgctgttttttttcttcacagcagttttcttcttctgcaaccacaaagtctatgggtaattagctgaagagtgaggtaatttcagaagaagtcagagaaaggtacttactcttgtaaaatgaacgggggcagaaggagttggaggcgtttgcttgggtgaagccgatggtgttctttctatgtcactcatttcggctacagcttggtcaacatcttcatcaatttcctcttcatctaaagcttgttcaatagatggatccaaggcgggcagatcatcagtcgacatatcagttggttgtggttgagttttcttgaatttggtctttttctttggagccaaggataaggtactcatggctgatgatctggttttccttttcttgcctgcgtcggctggttccctagttaggccgtgaaggagagttgaagtcttgggggcatggtagccgatgaaagggggagatagtccacctccattcggaattagatctgaagcatattcaatgttcttgacactgttactttgatgaggaggggaggactctgttgtctgcaaaacaggagtaagaggtcagtcaagtaatgaatcggctaactggttatgcaatttagtaatgacaaagtttaccggggcatgatgtcagggaatagatctgtcacatacattgaagccgattgatgaaatagatgcagcttccattcgccccaccatctatcaaagtttttgcttctaaatcttgccaactcaatattatcaatactgcccagagggggtcctggtaggttaagtagccgatccatcattagagtggaagtgatttgtcctcggcactgaatcttgtcggcaaagaataagccgattgggagttggcccaatccaagttgtctggccgagctcattgggtgataaaactcgtaagagacttggatgtttcttccttggtgaataccgacagggaggatgcatgggctgattgcagctataagaatttctctggatttttggaattttttatggttaatatcttcaaatctaaagtctaatggaagttcaaggtctgctgagtcttcgtagggaaaccagattcgtgcatctttcttaaaaccttcgtagaagctgcagaaccagtccttgagtaactcagccgatagcttcgctccagcatcggttggtgtggatgcatattctccatatgacatgcatctgcgatgggtgcgctcttctccatcatcttccacaatcggctctggcaatgggaattcagcttctgtcacagagggccgattgacaaccttcatgactaccaggtttaaccaagtttgcagcagccaccatggtccacctgctccaactattgagccgacggctattttagccgatgcattgttcaacatctggtacagatagccgagaaggattttgcccaaaggaaattctttctttgattctaaggcttcggctacgaattgccagttggttgtagagcaacaactggatccacagaagaggaatttttccagccaaataagcaagaaagctacatgctctcgaggggtaacagacccttggcccatatatgccgccacatagccagaccagccacctatgcttttggtcttgaagttgaattggttcttggtgttcatgctcatagggttagccgatgaagttacatctaatccagtaatcatggtgatgtcaattaaagttggagtcatcggcccttggttgaataagaaagcattaatggtgttggactagaagtaggtggcggcagccatcagaggttcatccttagtagaattggctatggtgagagcgagtgcttggccgattccaatttcatcccagtgaactttcttactagccgatacgcgttggtactaggtggtccagctcttatcaggagtaggtttttcgagagatggccaagacttgaaggtattcttccagtgactcaggttagggttggctagtctaaaggggatccggttagtttcaccgatgatgaaatcagtggggtcgagattgccgattgggccaagaaaatagtggtttttgtgtgaaaggctgggaatcgcgactaggttggaaaggtgctgcaaatccaaaggaattgggaagtagaaaacaagaggagaaaaggagaaattgagttcatgcgaggaaaagggaactagctggtgaggacttacctcagcgtactcagccgatggcgcagtagaagggctggtggaagacgacatcgccgcgggcggagatttggttgggaacaaaatcgcccggggatcgtcttgtgcgtcggggagatcaccggagagagagagagagggcaaagttggtttcagtggcaaaaacggaggaggacggtgtgagatttctcgagggtaacggttagtatttaaagcacggcagtaacggtcggaaaacggcaaagtgtgaaacttgctcggagtcgatttacagcaaatctgaaactctatcgaatattccggacttcgggggcatgtgttaacaaccaaatttggtaatatcggcatcgggaaagaagattagatcgaagcaaagttggaggcagagatcgagttcggaaacagagcaggaatcggctggagtccagatcggctacgattaggatcggctgggtctgagtcgggctaggtaagccgatgcagtcgattccgacaatgcaacatgatgtatgacatcgggttgaattgaggtgcttcaaggtgattgccgcacatggatagagtcatgagaaggcaattgtatctattaattaggatgttttatgtaatttcattagagatatgcttgggcaaaagtctgccgcaaagacttatggtatcttagagtttgttagagatagtagtcgtgtccgttatggacatatcttgtaattctcgggtataaatagacccgagccctatgtaacttttaacacacacgttcaatacaatttcggcgcatcgccaccatttttgctttagttttatttcgatgagttcttgctttcgggttgagctgcatcggttttgatcttcaacaagaggtaaaacttgttatggcggcttgtgttttcgggattagtgcttccatctttatgacactctaattttgtttatgtaattcgtcgagttttcatatatcctacataatccttggcaatatcgatatctgacctacaatcggctaacatccatcagtagaaggcagccgattaggttaaatgccgttgttgacttagattatataggatatctaccactctatgacacatccaatagcttgattgtctagatattgtccttcttttcatacttatagctgcatcagttaagtttgatcttatgagttgtgattagaatctcaatctctagcccgcttcttggttgctgattagggtagtatcggagtttcggagtttcagccgatcttgcttgatttaactactttttatcctatatgcttgattgacatgttaaatctgccctttacgttaagatcttgctgcatttaagtatattaagattttgtttagtatattctacttgctttaatatcttaatatagagtggtatcggagtattagctgatacatgctagatctatctgatcggctatgctatgaacgtatatagtctcattattaatatatatttcgatctaagtgatttatactacctcgacatggcgaccgatctatcccactcaattgatttaagtatatattgatataaagattatatattggtaatatctgcagctgatcgagtaattcaatcctttcttatttattaatgactgccgatcgatgcatatacgacatcggctcaaagataaatgatatgtcatcggcacctcgccgatcggctatcatttatagatttaactgcgatttctttgcttctatttcttgttgattacaggatcaaatcaactggcacgctcatacattcgaatgcgagctttggacctgcactggagttaagaagatctcccaggcctcgtgttttctgtcaacagcgtgttgttcagagttgaataaaattaatgattaaattactctactgtttcgctactcttaaatctttgctaaatgctgcttttgcaaatgagcctatattatgccatcctttggtatccttgtggacttgcatatttgttgtgtggcttgttgagtatgtcatatgctcattcttgcaataatcaatcaacctcagttgaagaaaaaggatccagaaggagaagacgtttggcttataccccagttgagctgcctatgggggtgaagctggagcttcgctagattttatttttccacagcagttttcttcgttgtgaggactaagtgcctcttcagtaagtattaattgctttagttattttgatgtatctgtatataaaattgtcagtttgtgtacctcggctgattcctggatggggattttatgcacaaataagttcggaaattactagtgaatttccgggcgtgacaagttggtatcagagccatctcgactgtaggataagccaaatggtcagactttaaggacaaattttctgaaaacatgatttgtgaaaaattttcttttcttccttctctaaaattctttgcaaattgttttatcgttctttcccctcccactttcaacttaagtagttgttaaacttattagagaaactcgaagacgtcgatgtggtctacttatggaggtcaagtcaagtgagtcgaggaaaaagaagataatggtcgaactgaagtgcggagcttttgtgatggagtgaagtttggatcctaccttagaacctaaaccaccaaagtgactttgaagtatagtcagtagggtacaacgtttgttacttgcttgtgtgtaggtatggttgcattcccatcattgggtgtgatgagcgtgtaattatactaggttgcttgcttaatcaacttaaacaatataatggtttacacacatcagatcagtggtaacatggttaaggtctcgtctttagtgtgacccctctccttctaacttttcaaactctgcgacggataaaaaaaatgcaagctatagtgggaacaacaacaatgctagtggatcaggaagttggaccaatggatcaatttaggacaatcacttgggcagagttcactgaagcattaaagaagacacacatagctgcaggagttgtttttttgaggaaacgtgagttcaagacacaaacaaaaggatgataccatgacagagtacctccatgagttcaaccgtctagctcgctatgctctagaagatgtgcgtactgacgaagaaaggtaggagaagttcttggaaggtctgaaggatgagctgttaattatgttgatccctcatgactgcggatttcaggagctggttgtcaaagcaattcgactggaatataagaagaacaggatggacaaccgtaagagaggaaggattgtttcccaggaggcacagggtagtagccaaaggcagcgtaccaagccactccaaattggtgaatcttcttctgcatgtcaagaacaattacaacagttggacattagtggtgagatcaactcagagactaatacaagaaatgaagttaacatggagaaagctactcaattagtgctagttcagcaggatcagtctcaagaaggtaatagtaatggaagggagcagcagttgtgtttcaattgttatgagccaggtcactttgcaagagagtgttcgaagccgaagcatcaacatccacaaggtcaagtcaacaacatcatcctcacaggagcaaatgcagtgccggttgcgtcttcaagtgatacagctcagcgatcagtttcaaagcagcagtagtttttttaaagccttagaataattattggagctagggaataagatagactgcagttttacctatttcctttttctttctagccgttccgaatctcgagacgagattctttgtaagggggtagatttgtcacatcctgattttcgttttaggatttataaattatctaataaattattattagaatttatattaaatgttcattaatttacaagtgaagttaaatgtggaaaataaaatttcctaaatataaagcatggatggatttaatttttattcaattctccatggttaattatactctctggaattttctcggatttttcggagctcaactcttaattttaatcatacaaacaatatttcagtaattatccacatattaaattaatcattaaatggtctggttttagtatttttaaatactttgagtgtccaagtatgttcaagatttttcttggaattatttgagcataggaagtatttttaacaattcaaagatcatttcagtgattaatttaattgaaaaagtaataaaaaatcctcctcctcagcttgggcccttttcagcccattccctctccgctctcctttccttagccgcagcagcccactctccctctttctcttggctgaagtccattcaggtccctccttcagtcgggccggagaaaaagtaagcccagacaaagtctactttacctccccggtactgttcatcttccagctccagacagagcccgagccagccgtcccgagattgtgcagcgccgttttctcctccaaatctagtctcctctctcgtgttatttcaaaattagttgaggggaaatattcctcttatgcttctctatctttttcccccaagaatcggactttatcccgaagaaatcaacgcggaatcgagctcgattcgtgtttatctctccaccaaaccctaggttttcctggcgcgattccttgcgttccaagcgcgatctctctctcccatggctataaatagagtcccctccctctcctctttcggccgccacctctccctctctccgccgtcgcttgtagcgccgtcgccgcgttcgtcttctctctccgccgcccgcagccgctccagccgccgtttgccgccgcctcggccgtcgccctcctgtgccgccacctctctcggctccgcaaggtcaagagcaagcccggcagccggttcccttgcgccgaagaccccgggaagcccatcgtcgccatcaacccgaagctcgccgtcgtgttttgatctccggcgaggctctgcagctcctcccgtcatcgccaagcttcgccgccgcctccattggattcgcagccgcgaagtgaagcccggccacccctccattgtcgccgaaggtcgccgaaacaccgtcgccgccgtggacagtacctcgctgccatctcgatctcgtcgccggccatcttccgtcactgtctgtcatcacgtaagtgttggtaagaatcgccgtcgccttctctacctctcggtgccctctgtttgcattgttgtgttgtggttcgccggcaaccgccgcacctatgtcgttcaccggtgtagtttatccctagggtcttaattcaatataatctaatccgtggttgatctagcgcgttgtcatctccgtgtgttgctgtcggaacgttgtcatcatcccttcctctccgatcgctttggttcggtgcgacttctatccgttctctcttttcaatggtatattatttctttttaatatatgtcatctaccaaatataatctaatctttttcggaggtcgttttaatcttttctctcagttataaatcatttgtaaatggtttaattaatttggaatagtcttttctttaatatgtttaattggaattaaatcttataaaattcatatctaattcatatgaagtcggaatgaggccgttcaagtctctaaattcatctaaaatcatgatttacatgtttgtttacattttatgtactgtttatttggtttttattagtttttttctccgttttgcgtgttagcttgtcgtttccgttgttgcgaaggttcgcgagtgtgttggaagtggttctgaagactaattgaagactgattattgcaaggcaagtcacacagatcccaaacatgattcctttgagcatgttgatcctatatttaaattctctatttatttcaacaatgcatttattttcgaatgtcaccgggtggtgtgaacatattcctttgttatggccaatttgtattgaatgccctattccttgataccttgggtaataaattgattagcttgaaccttatgtattggtttggttcagctaaatgctatatatataattgcttagccatgcctagaaacattagttcattaataggatgaatcctactacattattatttatggttatatttaatggtacctcacgatggttaatcatgttataataattaattgataattaaaacttgataatggtgggttgtgagcacatggttttgaaggtcgtgctcatgacaattaaggaccggttcgcgagctactgttgtgagacattaaccgtgccaaccacaagccagcgtgggcaacggctttaccttttgtatagcatggttcattgcggggcaccagactgtgaagcggcgagaagtccgtgggggtcgctggggagtccatgcctctggttattgagggggtgattatgatccaggaacggtggctgtggtggattgtgttgtgcaaggtactgtcacagttcctatccgagatatcatggtggtattgaggcgcatggtaacatgtcgtggagctgtgtcttgtgggtacagtggtacatctctggccagagtaaaactattcgaatagccgtgcccgtggttatgggcgagttgagcaatgtttttcgtgattagtctcatacctctcacaataattattgatgctataattggtaataatttgcttagctcctggtttggagttagatctgtacagccgggtatggttgttcagaatggttgggcctgagcagcatgggcgtattgttcagagttgattaaaattaatgattaaattactctactgtttcactactcttaaatctttgctaaatgctgcttttgcaaatgagcctatattatgccatcctttggtatccttgtgcacttgaatatttgctgtgtgacttgttgagtatgtcatatgcttattcctgcaataatcaatcaaccttagttaaagaaaaaggatccagaaggagaagacgtttggcttataccccagttgagctgtctgtgtgggtggagctggagcttcgctagattttatttttctgctgcagttttcttcgttgtgaggactaagtgcctcttcagtaagtattaattgctttagttattttgatggatttgtatattaaattatcagtttgtgtacctcggctgattcctggacgggggttttatgcacaaataagttcggaaattacctgtgaatttccgggcgtgacagcatgtatgcaacacgttgcttcatccatgtgactttgagaaacgcggcataactagtgtttccaagctttgccatttcttggttgcatgtgatcgagctgtaatctaaattcgtaatcttttaatcttttgagcgccgcactataatcaggatgatgatgttgccctcgatcaggtcactgggcccaccatcttgctcagaccgctagcggcgcacacagtctttgccttgagatgataacccctcaggcggagatctctgtgaagagcatgaggcaaccaataccagcgggcttctcgttagaattatcagatgttttgcttttaccctgggatagcgtcaatcccccgggctgtgttctaccccggggcacgtactgtgcctgggcccattggacggacccgagccccaggcacagtcccgtgctttgtaatagaagtcttcattatgttggacgaatttctggaagatgtcgttgatgaaggagttcatgatggacacaactctacaagtttattccaatacgcaattgtatctatgccttgaagatgcaaatcttgatggaagccagggcttaagggaagcaagggacccaattcttgttctgtgccagatgtcagtccccacatatgcatgccagatgtcagtccccacatatgtaggttgtcacctggcaaatgaattctaaatatgacagaaagtaataatgtggcccatggtactttaggatcccggagaaagggggaccccggttcccatttctccaacacataggattcttcaaaataataaatttcaaaaataaaaactcatgtgttgcaatagttccctttgttccaccggtcatatgtcataaatcatactggataaattgtctactttgcaaaacaaataacttactcttatttcatcattattatctagctattattatctagttgcttgttgtatacctggtttgagcatagaatttgatattcctcttaactcccagatttggcacctagctagagtaagaataggaaaacatggccagatttaaaaagaacccaaaacttgctatgcgaggccagtctaaccgccactgtagggtaaacttgaatgcgtaatattattactaaaagttttttggtgagcttaggtagatagtgcaatgaaggcgtgcggttttatggtagtgagtacaacatatcacttatttagatgtggcaaaacttaagtatatcacaatgagtacaagtttacttgcgattatacgtttcaatagccaaggctttgagtggtgtctctttgtgaagcaccatcccatacttctctctcatatccacaccatctttctcggctccttctggaagcttccagtcgaagtgaaacaacagtgacgcaagaaccatatgaaccatcctgtacgccagtggcaaaccaaggcagatccgccgtccgccaccaaacgggatgaactcgggatgcttgccgaagaaattggtgtccgtctccatgaatctctccggcataaacctatcaggatcagcccacacgtcaggcttgcgatggatcgcccaaatattcagtatgatgttggtgcctttgggaataatatagccttgcacttccactgtagcctctgctttgtagtacgtcattgggacacttgggtggagccggagcgtttcttttagtacagcttggaggtaaggaagctggctaatgtcagactcctctatctctgttctagtacccaaaactctcctaaactcgtccttcaccttctgcattgattgtggattttgcagtaattcaacaattgcccactctattgcagttgagcccgagtcagttccagcgacaaataaatcctgggatgtgtgttgatcaaagccaattcatcaatattatgcagattgtgatgaacgattgaaatgataactaattactaccgtcttctgtcaaacgaaaatgaaacactaattggatgtcattatcatacattctcgtctcgtctcgctttccattgaattgagaaataatttaagattcaagaattaatcataccgcgatgagtcccttgatgttattacggtcaatcacaggattgttgttcttccattcgtcttcgttatcgagcgccacgtccagcatgtcatccttccgcggctcgccggcttcacggccacccttccgccgagcaagaagctcgtcgatgatcccataggcacgcgctactagcttccccatcctgcgccgcaagccctgcaggcaatgttttaaataacggggttaaggcatttatcggttagcttctcaaacagttatagcttccgctacagtagactaaatggagttataacgactaaattgtacatgagagcaaatagctagaacccttctcaaacagctatagcgggagatttaaaaccctgcctgcaggtcggcggccgccatcgccgggaagaagtcggaggcgttgggcgtcgcggctagcttggtggcctcctggacggcgtccctcaggtcgggtcgacgaggtcggcggagaacgcggtgcacgacaggatgcccaggaatgcctcgaacgcctcgagcccgacctcgacgggctcgccgcgcgccgctcgcctggcgacgcagcgcatcagctcccgaaccttctcccgccgcgtcggcgccagcgcgtcgagcctcctgggcgacatgacctcctccgtagcgagcctccgctgcgcgcgccacacgccgtgcagcgggaggacgatgacggagttgcggtggtgctccgcgccccgccacacgtcgaacagcgggcgggacgcaaggtgcgcgttgtggctgtggtggtggatatcgcccgcgacggccggcgacgaggcgacgacgtaatcgacgacgccgagccggacgcgcatgagcgggcagtagcgctcggcgaggcgcgcgagcgagcggtgggggccgctccgcgatacggacaggaggttgccgacgagcggaagaggcgttggtcccggaggaaggcggcggcggcgcgcggcggctactcggtggtgcatggcgaggtagagagaggcgaggacgatagcaacaagcaaccaagccagggatgccgccatggctagcgtacgttcaaggggtacgtacgtgctgatcgaccttgatatgatgcagtagcttgcaccatatgcctcaatttatagtgaatgctctggccattagaatgctattactccttccatgtcatattactacgtgaataccccgccgcattgctgcgggaaattaagttatatcatatgtataaataacatacaatacaattattaaaactaaaacaaattgatacttatgaattttaagccgaaaataattgagattgcatggtgttatgagagaagaaagaagagacaatttgaaccacagctctatcatccaaatgctagaaataattgaggtcatgtggcataataagagaagagagaaatagcattaactatgtaggatctgttaacaaccaaatttggtaattcaggcatcgaaggtaaagataaaatcgaagcagaatccaagatatggatcttccggaaacagagtaagaatcggctgaaatccgaatcggctgcgaccaggattggcagagttcgagtcggacaaggtagccgattgagccgattccgtcaaagtgtcccgatacacatcatcgagttgagttaatgtgcttcacatggattgccacacacggattgagttctgaaaaggcaattgtatctattaattaggatattttatgtaaataacttagagataagcttgggcaaaagtctgccgcaaagacttatggtatcttagagtttcttagtgataagagtcgtgtccgacaaggacatattttgtatctcggatataaatatgactcgaagccatgtaatcaaacaacacacgttcaatatcaatcttggcgcattgccaccctttttactttcgtttcatcccgacgagttcttgctttcgggttgagctgcatcggtttcgatcaactagaggtaaatttgtcatggcagcttgcgttctcgggattagtgcttccatcattataatactctaatcttgttcatgtaagttgtcaagttatcatatattctatgtaatctctagcaatattgttatttaaccctcaatcggctaacatctgttaatgggaggcggccaattaggttaaataccaacgttgacttagattatatagggtgtctaccactctatgaagtttccaaaagcttgattgtttagatattgttattgttttcatacttatagctgcatcagttgagtttgaccttataagtcgtgattagaatctcattctttaacctgcttttggtcgctgattaaagtagtgtcggggtttcagccgatattacctgatttagctttatatcttatatgcttgattgacatgctagatcagccctttatgttaagatgctgtggctttcaggtatattaagctttctgtttggtatattttgcttgctttaatatctttatatagagttttattggagtattagctgatacatgctgggtctatttgatcggctatgctatcaactcttataatcttttcgtcaatatatatttcgatctaagtgatttatattgtctcggcatggcgaccgatctatcccaatcatttggtttaaatatatatcgacaaagggattatatactaatgatatctacagccgatcgagtagatttagttctattttgcttatttacaactgccgatcgattcaaatatgacatcagctcaaaggtaaatgatatgtcatcggcggctggccgatcggctatcatttatgggtttaactgctattttcctattttatttcttgttgattgcaggttcaaatcaactggcacgctcacgaacctaaaaggcaagatttttggaccggcactgaagttaagcagatcttccaggccactgtctgttttccgtatcaacacgcttttggtacgcccagtgggaccgagtttcaataacttttctcatggctgagaaaccaccgcagtcgccagcgacggtgggcaaggccgagccacctcttagcaagccaccacctgggcaaccgtctgaggtcaataagggaaacatcatcccaatcacattagataagttgtcagctgagcagaggcaggagctcgagcagatgatgagcaccgtgaaggacaaattcatgaactcattccaggagacccacgagggaacggtcgtccaaaaatataagctcaaagtggtcactgccgatgaagctgggacaagttcatctcaaggtgttaagggtactgcagattgctcaggtgataaaggtgatgggcttcaagatggcttggtcgaggatcttggtgaagatggtaccgaagagcaacaacctctgaaattcaacagtttccaagatcaagtcgattatgctgtaaagcatgcgttgatgaaccaattaggagttattgtcaatactttatcgaatatgatcaagtcaatggttgatggcacgatagctgagcatcaaaatacgggaccagtttatcttccaggaggtgtcttcccaaattacagagagttggtaactggtaaccaacagcccgctatcagtgcaccaccagcctagccgatggcaccagcttcggctcctgcgccagttgcaccgtcatcggcacagaggcaaatgaccaatcccagattgctgaccagagaacgaccatagcatgctgcgcaaaatatcaatcggctgactcaggaacaggttgccacgatgtttctaccaacaccaccaactactgatccagtacagtcaatgctggttcagtaaacaccaccaaggcagcaagtagtacagccgattcaacaacaggtggttcagccgattcagcagcaaatggtgcgacaagtgccaactgggttgaggacacctgacaatcggcaaagacaacagaatgtagctcaagttatccctaagcatctggtgcataatgtacaaccaaatcaatcggctgtggctcaagtcgttcctaaacatttggtacacaatatacggccgaatttccagaattatcaagggggtaatttgaactaccagtatcagcctccttcacctcatgtccagcatcaacaaggtggatcacctcaattgcagacattgcctcagttcagccagtttgatccgatgcagcaacagatgcaaggagtacctcaacagaaaccttgggcagatgtgatgagggagcaatttggccttaagccaaaggactctggaaatttgtatcggcacttgtatcctgaatggtttgagaaggtttcattgcctaaccgatacaaagtcccagatttttcaaaattttcatggcaagacaatgttttgacttatgaacatattagtcgattcttggctcagtgtggtgaggcatcggctgttgacgctttgagggttagattgttcccattgtccttgtacggatcggtgttcacttggttttcttctttgccttacaactctgtcaatagttgggccgatttggagaaacaattacacagctatttttacagtggagttcatgagatgaagctatctgatttaacagcagtcaggcagaggcatgatgaaactgtacaagactatattcagaggttcagagagatgaggaatacgtgctacagtctggctttgactgattctcagttagccgatttagcttttcaaggtttgatagctcgaatcaaggagaaattttcatcccaagactttgagagcctatttcatctcgcacagaaggtgactatgcatgagcaaaggtttgcggaggctaagaagaatttcaagaagatcaatcatgtatatccttacatttatgactccgatgtggaggatgattccgaagtagcagcagccgggtgggttaggagcaaaaaggttgtgacatgcccattggtgaggagttctggaaaggaggaaagatttgactttgatatcaccaaggctgacaagatttttgatttgttgcttcgggagaaacagattcaacttcctgctagccatataatcccatcggccgaagaattaggcaaaaggaggtattgcaagtggcataattctggtttttattatactaatgattgcaaagtttttagacagcagatccaggtagccattgaaggggacaaaaatcaaatttgatgattcaaagaagccaatgaaggttgatggtaaccctttccctatcaatatggtgcatacttctgggaggacagccgatggaggaaggagccagaattctcaattgaattcggttaggattatcaacaagtatcagaagaagcatgataaacagcaggaaaggtttgatgaagaagttgatgatggttttgattctcattgggattgtgaattcttcagattttattggaatcaaggcatgaggttaccatcgattgaagattgccctgggtgcagtgatattgcaggagttcaagccgatcgtataacagaagctatcggccgagtcagaaaaggttgcctgttcatcagaggttgggcctgatcaatcaagaccgtcaccaggatgaagatgaggatggaaagacacagtggtgtccttctggtattttcacaaagaatcagaagagaagagttcaacggatgaggaacagggagcgtttttaggaggtacaacaagaaattaaccatcggctgaagaagacaaagaccaagcaagagtggcgtgttaagagcacggtcacaacagccgatgaagttgaagccgacaagaccaaaagattgctcaagggtaaggctactgcatctgcatcggtgaacatggtttttatgctgcctgcagaattcgaagccaaggaagccgatgttgatgatgttgaagaagcttctgctagattggttttgtcacctaaacaaacaatttttgagaaaccagaggggacagaaaatcggcatttaaaaccattgtatgtcaatggatttgtcaacgggaagccgatgtccaagatgatggttgatggaggagcaactgtgaatttgatgccatgtgctacattcagaaagttgggcagaaattcaaacgatctcatcaaaactaacatggttctcaaggattttggtggcaatccatcggagactaaaggagttttgaatgtggagctgacagtcggcagtaaaaccgttcctacaacattttgttgtgattgatgggaagggttcctatagcctgttgcttggaaagggattggatttatgctaattgttgtattccttcaactatgcaccagtgcttgattcgatggcaaggtgacaaaattgagattgtgccagctgacaggtcagttaacgttgctagtgccgatttagctctttgggaaatggatggtattgattgcttgtctggaaaagtttgggatggagattttctaaaagtgtccgattgtgacatacagctaattgaagatggagagcccaagctattactttgagggcattgtggagggttcaaacgtctactcgaaggacagagtagatgatctcgatgacaagcaaggacaaggtttcatgtcggttgatgatttggatgaaattgacattggtccaggagatagaccaaggccgacattcatcagtaagaacttatcttcagaattcagaaccaagttgatagagcttttaaaggaatttagagattatttcgcttgggagtattatgagatgccgggacttagccgatcgattgttgaacatcggcttcctattaaaccgggggttagaccacatcagcagccgccaagaagatgcaaagccgatatgcttgatgctgttaaagctgaggttgcacgtctatatgatgctagtttcattcgtccatgccgatatgctgagtggatttcaaatatagtttcggtcatcaagaaaaatggcaaagttagggtgtgtatttattttcgcgatttaaacaaagctacccctaaggacgagtacccaatgccgattgccgatcaattggttgatgctgcttcaggacataagatacttagttttatggatggtaatgcaggatacaatcaaatctttatggcagaagaagacattcataagacagctttcaggtgccctggtgcaatcggcttgtttgaatgggttgtgatgactttcagcttgaaaagtgctggaggtacatatcaaagagccatgaattatatattccatgacttgattggctggttggttgaagtctatatcgatgacgtggtcgttaagtcaaaagaaatagcagaccacatagccgatttaagaaaggtttttgaaagaactcggaaatatggcttgaagatgaatccaatgaagtgtgctttcggtgtatcggctggccagtttttgggattttttttgttcatgagagggggatggaggtgcctcaaaggagtatttacgcgataaaaaagattcaacctccggaggacaagaaaaagttacagaaattgatcggcaagataaattttattagaaggtttatttcttgagattgaaagccgatcaagagttaacctggggggcagaggaacggaaggctttggataacattaaagaatatcttagttctccttcagttttgattcctccacagaagggagtgcctttcaggttatatctattagccggtgagaagtcaatcagctcgattttgattcaggagcttgaaggcaagggaagggttatattttatctgagtcgcaggcttttggatgttgagacgaggtattcttctgtggaaaagttgtgtttgtgtttatatttttcttgcacaaagttaaggcattatttattgtccaatgaatgcactgtgatatgtaaggccgatgtggttaaatacatgctatcggctccgattttcaaaggaagagttggaaagtggatatttgctttaacggaatttgatcttcggtatgaatcactaaaggcagtgaaagggcaagctgtagccgattttattgtggatcatcgtgatgactcaatcggctcggtcgagattatgccttgtaataagaacacaactagctcggatataaccatggctactttatgtattactcaaccaaaggtgcatatgttctatattagatttacttgttatatatttgaacaaacattgcaaaacgatgagttttgtgtgttttcgtttgcagaggtacttgcttgggcgaaagaaaagagaccgagcataagaaatgcatggatgattgaagaagttgattagggaccaaaccaagaccttctccaagtcttctttcatctaaccacgtcacttttggcccatagaagacaagagattaagttgtgcacgttttggaatcggattcgggcctcctaacatgatcaacttcaaacggacctagccactgatctagaaggaatttcggggcccatgaatacttgttggaaagcttatggagtctactttcagatggtttttgtcccatgttaaaattcctattgagctgccgggaatccgcaaaacaagccacgtatctcatccagtccgaatctgatttgggttttgggccttataattttgtcgtgggcttagcccaagggggtgtgcaccctagggcaatcctaggacgtccctaatcacattttttcagtagccgtcaacgtttagagttgggttttgcttagattaatctgtcaagaacagttttgccgctagatcggtttgtggaaccccaaatttgtgtgcttaatcattcatatgcaatttggttgcaatctatcttgttcttgcttgtgttctttgattcgcatgcagggattagctttctcggcgaggtcaaccgggtttcggcacggttgataaccagaggagacgtggtgctacgattgcgggggtcagtagcgtgtacattcagaagctggatcgagttgtgtcgcgactctgcccaaatcgactgtttatcaatacctatcggaagatcgggacctaacatccctcatcaccttggactttgtttttcgatggatcagtgtgcactcatggttgtcgtttcggcttagtcataatttctcctcggagggcaagtttcgagtttgcctacatgattaaaccttatgcaactaacaatcaagctgaatatgaagcagcactcaagggtttgcagttgttaaaggaagttgaaaccgatgctgttgagattatgggagattcattattggtgatcagccaattggcagaagaatatgaatgcaaaaatgatacattgattatctacaatgagaagtgccgagaattaatggatagttttcggctggtaactttgaggcatgtgtctcgagagcaaaatgttgaagctaatgatttggcccaaggggcatcgggatagaagccgatgataagagatatcgaagtggaagttgctatgatcacagccgatgattggaggtatgatgtatttaattatttgcagaatccatgtcaatcggcttcgcggaaattgcgctataaggccttgaaatacaccttgttggatgatgagctgaattatcggacgattgatggggtattgcttaagtgtttaagtgccgatcaagccaaggtcataatgggcgaggtacatgagggtatatgtggtactcatcaatcggctcataagatgaagtgattgcttcggcgtgcgggatatttttggccgatgatgttagaggattgcttcagatattacaaaggatgtcaagattgtcagaagtttggagcagttcagagggcaccagcatcggctatgaaccctataatcaaaccatggccgtttaggggttgggggattgatatgatcggtatggttaatccaccctcgagcaaaggacacaagtttatattggtggcaaccgattactttaccaagtgggtggaggctattcctttgaagaaactagattcgagagatgctatacaattcgttcaagaacatattatttaccgatttaggattcctcaaaccattacaaccgatcaaggttcaatctttgtgtccgatgagtttgttcagtttgccgatagcatgggtatcaaattgttgaattcttcgccttattatgcacaagctaatggacaagtcgaggcatctaacaagagtttaatcaagctaattaagagaaagatttctgattatccttggcaatggcatacaaggttggtagaagcattgtggtcgattggatggcttatcatggttcaattcaagttcctccttgtaagcttgtttatggacatgaggcagttttaccttgggaaattagaatcggctcgagaaggatagatttacaagatgaattgacagccgatgagtattacaatctcatggccgatgaaaaggaagactttgttcaatcaagattaagagctcttgctagagttactaaggacaaagagagggttgctaggcattataacaagaaagtggtgcctaaatatttttctgaaggagagcttgtttggaaattgattttgtcgatcggaactcgagataataaattcggtaagtggtcaccaaattgggagggaacattccaaattcataaagttgtttccaagggagcttacatgttgcaagggcttgatggaaaagtttatggacgagcacttaatggcaagtatttgaagaaatattatcccagcgtgtggattaattcacgatcggttgcgctttgctaatgcatgtacatccaatgtggttaacatcgccttcagatggccgatatagttatatcgcccttagcagtttttgtttatcatattcggctgagttttgccgatatatgatggccgatatggttatatcgcccttagtcatttatgtaatcttatcataatcggttgtatcttgccgatgtatgatggccgatagttaatatatcaccgttagtctcaaattataattttatcaatgctttcatcattgcaaaattagggaggcacatgtataaaaaaattgagaatttttgagtaaatttgagaattttcgagcaaattgaaaagttatgttaatcggcacaaaggatcagtaggacaatcaaaaggagtatcaaagtttcttagccgattacaaaagttttataagtcctattataaagataatcacccagacaagtaacgttggatagccgacacagcttgttgcctaatttgctctacttcttcaatgggctggatgtcttgagcatcggttccaggaatgaccttgagggatttggtcatgtcggctactttcttgatggccgatcttagtctggacgtctgttcttcaacagcgttggggagattagctaatttttgtttctccagatccagttcggcgttgcattcttcaaattgtgctatgagatcaattttgcgggcttcaaactgatctatgttagactgaattggcccaatagagagctgatcaagcttagctttctctttatgcacaagttgccgattggcctgaatggtggcttcaatatcctttcgctcccgtcgatcggctatcctttgcttggccttttccagcttgaattgatgttgctcgagatacacagctggagagatgatattcgccaggtcatccgggactaaggcttgaatctctgcaaatcttgcccgaattgaaccacagtcagctaccaagttgtccaatgatgactctagccgatgagagatatcttcaagagttcttttgacatcttcatccggaggagctagggtcttacttgttgtttcttcttctgcctcttcatcaaagtaatccttgatgtcaaaggaaaacagatcggctaagacctgcaagagagaaaattgaagacagttaaatttaaagctatataaccgatctaagaattatgacaatgaaaggattactgggatagcaggagcggctggttgttcttcttcctcaacattatggctacctgcagccgatggagtacgatcacttgatatcggctgaccaggaggagaaggaggaggagcctgaaaaggacaagtgttaattaacattggctatgatcaaagttaaaagacttttatagaaggaaccttaccgatggaacttgtctatatggtgctggtgccgatttcttcttcacagcagttttctttttctgcaaatacgagactaatgagcaatcgactatacaaatttctattcaagagataataaagatgagttatttacccttgaaaagtgagctggagcagcaggagtaggaggtgttcttttacgagaagccgatggtgtcttatctcccgagtcgcttagtctagctgctgcctggtcaacatcttcttcaatctcctcttcatccaggactttttctatggatggatctaaggcgggcaagtcatcggttggcttggacttcttcttcatggctttcttcttcggagccagagccgatagatcaacggccgatgccttagctttccttttcctgccgatattggctggttctctcagttgcccttggagtagacttgaggtcttgggggcatggtagccaatgacagggggagctagtccacctccttttggtatgaggcctagggcatattctatgtccttgccgctattgctcttgcgaggaggagaagattctgttgtctgaaaaatagaagaagttagtcaagatgcaaatcagttgacagctattatacaaaattgacaacatgaaggtttacccgagggataacatccgggaataagtctgtcatatacatggaagccgattggcggaacaagtgttgcttccattcatcccaccatcaatcgaagtccctactcctgaaccttgccagttctatgttttcaatgctgcccaaggaaggttctgagatattgagcagccaatccatcatcaatactgacgaaatctctcctctgcattggattttattggcaaattataagccgattggcaattgtcccatcccaaactacctagccgagctcattggatggtagaattcataagatacttgtatatttctcccatatggatgccaataggaagaatgcatgggctgatagcagctgaaaaaacttctctagacttatcaaatttctcagaattgatttcttcaaatctgaagtccgatggcagctcaaagtccattgaatcctcatatgcaaaccaaactcgggcatctttctgaaagccttcacagaaactgcataaccagtctttgagcaattcagccgatagctttgctccggaatcggctggtgttgatgcagcttctccatatgacatgcatcgtcggtgggtgacttcttctccatcatcattgatggtgggttctagacttggaaattcagcatctgtcaaaggtggctgatttacagccttcatggcaaccaggttgagccaggtttgtagcagccaccatggtccacttgcaccgactactgaacctatggctattttagccgatgcattgctcaacatttggtataggtagccgaggagaattttgcccaaaggaatttgcttctttgtttcaagggcttcggctaagaattgctaattggtagtagggccatagcttgatccacagaacagaaacttctcgagccacattaacaggaaggctgagtgctctcggggggtaacagatcctttgcccatgtatgcagcaacatagccagaccagccacctatgctcttggtcttgaagtcaaattggttcttggtgttcaaactcatggggttagccgatgaagtcacatccaaaccgatgagcatggtgatatcaagcagagtgggggtcattggcccttgattaaaaaggaaggcattaagggcgttggactagaaataggttgcagaagccatcaagggttcgtccttagccgaatttgctaaagtaagagcaagggcttggccgattcctagttcatccgagtgaacttgtttgctggccgatacacgcttgtaccatacagaccaacttttctcgggagaagttttctcaagggaaggccaagacttgaaagtgtttttccaatgacctagatttgggttggccaatccaaagggttatcctattggtttcggcgatgatgaactcagtgggatcgggattgccgatggggccaagaaagtactgatgctcatgtgacaaactgggaattgcaaccagattggacagatgctacagatgcaaaaaagaatagagaagaagaaaacaagatgagataaggaaaaaccgatctactacacaaaggagaggatctagccgatgggtacttacttctgcgtattcggctgatggtgcggcagacgggctggcgaaagtcgacatcgccacgggtggaagcttctcggagcttgaatcgccttgggatcgcctttttgcactgaggggattgccggagagaaatgagacaaagtttgcttaagcagtgaaaacagaagtaacggtgtgaagtttctcggggtgacggttagtatttaaagtgctgcgataacggtcggacaaacggcaaagtcttaacaaccaaattttgtaattaaggcatcgaagataaagataaaatcgaagcggaatccaagatatggatcgttccggaaacagagtccgaatcggttgaagtccgaatcggctgcgttcgggattggcagagttcgagtcggacaaggtagccgattgagctgattccgtcaaagtgacccgatacacgtcatcgggttgagttaatgtgcttcatatggattgccacacatggattgagtcctgaaaaggcaattgtatctattaattaggatattttatgtaaatactatagagataagcttgggcaaaagtctgccgcaaatgcttattgtatcttagagtttgttagagataagagtcgtatccgacaaggatatattttgtatctcgggaataaatatgacccgaagccatgtaatcaaacaacacatgttcaataacaatctcggcgcatcgccaccctttttacttttgtttcatctcgacgagttcttactttcgggttgagttgcaacagtttcgatcttcaactagaggtaaacttgtcatggcggcttgcgttctcgggattagtgcttccatcattatgatactctaatcttgttcatgtaagttgtcgagttatcatatattctatataatatttggcaatattgttatttaaccctcaatcggctaacatctgttaatgggaggcggccaattaggttaaataccaacgttgacttagattatatagggtgtctaccactttatgaagtttccaaaagcttgattgtttagatattgttattcttttcatacttatagctgcatcagttgagtttgaccttataagtcgtgattagaatctcaatctttaaactgcttttggtcgccgattagagtagtgtcggggtttcagccgatcttacctgatttagctttatatcttatatgcttgattaacatgccagatctgccctttatgttaagatgctgttgcttttaggtatattaagctttctgtttggtatatttttcttgctttaatatcttaatatagagttgtattggagtattagctgatacatgctgggtctatttgatcggctacactatcaactcttataatcttttcgttttatatatattttgatctaaataatttatactgtctcggcatggcaaccgatctattccaatcacttggtttaaatatatatcgacaaagggattatatactgatgaaatctacagccgatcgagtagatttagttctattttgcttatttataactgccgatcgattcaaatatgacatcggctcaaaggttaacgatatgtcatcggcggctggccgatcgactatcatttatgggtttaactgctattttcctatttaatttcttgttgattgcaggatcaaatcaactgggacactcacgaacctaaaaggtaagttttttggacctgcactgaagttaagcagatcttccaggccactgtgtgttttttgcatcaacgggatcgaacacaagtaaccaagccttccagaggggggtgaatggtagggaaaacctaaaacccaaaaacttttagcggaaataaaagttaccctcaaatcgatggaaatcacgacgtagtcatgtcaccgccggtcacaccgcttctaagccgccggtccgaccgccgtagtttgcctggttagaccatcgcgccgccttcggttagactgccgtactcccaccggtcagaccgccgccttgctgtcgttcaaaccgtctccctgccgccggtgtgaccgcccgccggttagaccgatgactcgcctccggtcaaaccggtgggatccagaaaaacacttatcgacaaaacacttgaaagtatatcaacatttttgcatcaatatgtgtttacaaagttcacctaaagcactcatctctcaattcacgaaataggattaaaaccacgaagtaaaccctaacttttctttcctagaagtcgttatcttctagcctcaaccgctcatctatttatagcaaaaaatcctctattcaaagtacatataaaactcctattcccagtaggactcaatccttcaatttccaaaacctgtaaccgcacgcaccggtcacagaaaatccagcatcaaatcccgaacgcactcggtctcctcgagcaggctgacaccaactcggcctagctcagagttatggatgtactgctaaacagccaaggtcggagcttttttcattaagagttgaaagcaaattggtaatataaatgctattacttaattaaccatttttggatgcaacacatgaaacaaagatgccacaaatgaccttaaaaaaaagaatcctagaacaaaatgggaagatctctgccttgcgcctccaggccgacagcctctgctgctcctgcacacacgcaagcaaaaccagcaagctgctgcatgataactccaagcaagtaacacacacgccaaccaactagctgctcatgtacagccacatgcacacatacatgcttcaccaagcatgtatcaacacacacgccaaccagactagctgcacatgtacagccacatgcacacatacattcttcaccaagcatgtatcgatcacacatacacgtacagcacacgtacatgcatctctgctacagtgcctcatgtactgtagcagccctttttctcctccaatttaatccaatctccttcgcgaacaccgacgcttgcacgcacacctcgtgaagcccgttgcataaatctcccccacacggtgtccatccaccgtgcgccatctcgtatccaactttgtcacccggtatgcttgaccgtatggacctcaactccgccttgagtctagtcccgatccccaccgttgaccgaagttgacctccaagaattctgattctagtcaccttctcaaatggtatcctgaccgcactagacctctgctcctccccaagaatagtcccggtcctcaccattgaccaaggatgacctcaagtcacctgcacacaatcagacaaaacaaccgttcctgggcacatatatcacaacatgacccacattagtcacacgaactcacaccaacatccacacatcttttcaaaccattttatcgaataaattattttgcaaagccaattattcatcacaaatattaatcatgacaatgatttcacaaactacacttagtgggaatgaactatatcagtatataggataagtcacttcgaattttttttctaatcatcttttagtttgatcaaatttatcgaaaaatttgcaataacaacaacattaaattaaagtttcatcaaatctaacatttgaatttatattaataatatgtttattttgtggttgaaatgctactgtgcaaaagctaaaaaaattgccttataatgctagaagttcaattgctctcatctggcggtagattaaagtgttagtatcagttaccactcttaattctgctcttgatatatagttccaataggtctatttagtgtgtgtgcgtaaaatttgaagtttattacaaagttcttttgtcccataatttacacagtgcaaataatctattttctgatgtgttttacatatatacaaattcaattgctgattcgccttttttttaatgttgattcatgtgagagtatcctcgagtgttacgacttgcatcttctatgaaggccaaaaaccttttaagaggtcaatctaggatgaaaattaacaggatgcttaaggtatcttagaatagatcgagtaatatattgtatgcccatgatgtcgaaacaatatttcagcaatactaaaagggtgtgtgtggagattatgggtaccccatacccacatggcatagttatccgactggctataggggataacttatatctatggaatatgtaacagatcatgacttgggtattacgtttccttgtatgttacggaacggcctaaagtcctggtttgataatattgtaaagtagatttaggaaaccgataccgtattggttaaggtttctatcttgtaatcctgccccccaccctatataaggtgggcaggaggccctctagggggcatgagacaacctgatcgtcagatctatactacaccggcggattcaaatccccaaacaggagtagggtattacctctcatcgagagggcctgaacctgtctaaatcctttgtctctgcatccatccacttttaggtctcgtgcgctacctccttttattattgccgaattcatgtttcgacagttggcgcgccaggtaggggttgcgtcgagtttcctatcaacgagcgcgatggaatcaatttcatgagtcgccgacttcgctttcgctttgggagttttcacttcctttgcgtcgaccacttcttcaagctcctcttctctgacttgatccaaatcagtcagggggaaactcaatctgatttttatcattatttatcatattgatttttaatctcagattaatttcttgctattttttgttgttgttcgcatataactacgcggcactattgaggcgattgatgctggtcatggactcgaggcgtctcagctttccggtcgatcggccgcgagtccactccgccggcttgtcctcgccaccgccattgctgatagcaacaacgacttcaccgccggcctgcctccgtcgccgccgactggtgtcatcgcctatacggttggtcggtcacaccaccgttcatgggcgtccatgtcttcaccgaccggctggccttcgccgccgccgactggtgtttccgcctgcacggctggcctattatgccgccgctgttgggcgtctacgacttcaccgccggcctgcctccgtcgccgccgagtggtgcctccgcctacacggctggcctattcactccgtcgccgccgactggtgtcctcgcctatacggtcggttggtcacaccaccgttgatgggcatcgttatctacaccgccggcctgcctccgtcgccgccgactggtgtccccgcctatacggtcggttggtcacaccaccgttgatgggcatcgtcatctacaccgccggcctgcctccgtcgccgccgactggtgtcctcgcctacacggctggcctattatgccgccgctgttgggcgtctacgacttcaccgccggcctgcctccgtcgccgccgattggtgcctccgcctacacggctggcctattatgccgccgctgttgggcgtctacgacttcaccgccggcctgcctccgtcgccgccgagtggtgcctccgcctacacggctggcctattcactccgtcgccgccgactggtgtcctcgcctacacggctggcctattatgccgccgctgttgggcgtctacgacttcaccgccggcctgcctccgtcgccgccgactggtgtcctcgcctacacggctggcctattatgccgccgctgttgggcgtctacgacttcaccgccggcctgcctccgtcgccgccgattggtgcctccgcctacacggctggcctattatgccgccgctgttgggcgtctacgacttcaccgccggcctgcctccgtcgccgccgagtggtgcctccgcctacacggctggcctattatgccgccgctgttgggcgtctacaacttcaccgccggcctgcctccgtcgccgccgagtggtccctccgcctacacggctggcctattatgccgccgctgttgggcgtctacgacttcaccgccggcttgcctccgtcgccgccgagtggtgcctccgcctacacggctggcctattatgccgccgttgttggatgtctacatcctcaccgttggctcaccttcgctgccgtcgactggtgtttccgcttacacggctgacctattatgccgccattagtaggcatcttcgctttcaccgtcgaccgccttcgtcgccgccgactggtgtcttcattgttattgatggacgactttgttcccacattggccacttccgccatcaccaaggggaatattacaaagctaagtcatcatttattttattctttatatgatatttttccttttcctctgcctcactacaccaattggtcttccattgagtagtgagtcgggggctacagatgttatatcatattttttataatatttatcttgattgcttgcgacataatctgagtacaaaagtacctatcgagttatggagttctatcttcctatgctttccgtttggtttgccaatggatggttgcctttgggccgattcctagcacccgggggctcgttggatggaccgagtaacgcaaggtgctaagtattattcggaataaatcaaaagcatagagataagataatttattttctgctcttaataattgcaaaagtacccgagtagtaaactccgatccgtgaaactttgttccattaatgacgaactcatgtcactcatatgcatgtttgggaagtgcttaggccgactcccagtgcttggtggctatgactagtcgggcagagtgtttaaacgtaatgagtcatctgctcggggaaatcaaaattgacaagaggagaaatacatatttataaatattttaaaatacttgattttttctcgagtattatatttatatcagatactactcatcctatatgtttgttctgcaggatccagatccagatatgcataaaagggattcatggctttaagcttatctcttacgctccaggaatggatcagtcagaacatcaccaccggctcgcctcgaccgccgccgactggtgtttccgcctacacggctggcctattatgccgccgttgttgggcgcctacgtcttcaccgaccggcttgccttcgtcgccgccgaccgatgtcctcgcctgcacggctggcctttatgccgccgttgttgggcgtctacgtcttcaccgaccggcttgccttcgtcgccgccgaccgatgtcctcgcctgcacggctggcctttatgccgccgttgttgggcgtctacgtcttcaccgaccggcttgccttcgtcgccgccgactggtgtccccgcctgcacggctggcctattatgccgccgttgttgggcgtctacgtcttcaccgaccggcttgccttcgccgccgccgactggtgtttccgcctgcacggctggcctttatgccgccgttgttgggcgtctacgtcttcaccgaccggcttgccttcgccgccgccgactggtgtttccgcctgcacggctggcctttatgccgccgttgttgggcgtctacgtcttcaccgaccggcttgccttcgccgccgccgactggtgtttccgcttgcacggctggcctttatgccgccgtagttgggcgtctacgtcttcaccgaccggcttgccttcgccgccgccgactggtgtttccgcttgcacggctggcctttatgccgccgtagttgggcgtctacgtcttcaccgaccggcttgccttcgtcgccgccgactggtgtcctcgcctgcacggctggcctattatgccgccgttgttgggcgcctacgtcttcaccgaccggcttgcctttgtcgccgccgaccgatgtcctcgcctgcacggctggcctttatgccgccgttgttgggcgtctacgtcttcaccgatcggcttgccttcgccgccgccgactggtgtttccgcctgcacggctggcctttatgccgccgttgttgggcgtctacgtcttcaccgaccggccgccgcatccgccgctgactggtgtcaccgcctgcacggctggcctgttataacgccaactgatgctatcttcttcacggctggctacatcgctgtcactactaataggcatcagtatcttcaacacaagctgcctacgtttgccatggctgccgactggtttcttcacttccatggctgcatgattctgccagtgttgattggccttaccatcttcatcgccggtcgtctcgtctgctgctgactagtgccctcgcctctacatctggtttatacagctaccactactgatggacatcatcgtcttccgccgccgactcgtgttatgccgccgccgactagtgcttttatcttcacaactgcgcgtcttcactaccggttcacttcatcacggcaacacaactttgtcatcatggtggagcgacttcatctttattatcttcggaaccagcaaactctattgctgctacttcacaagttttgctacatcaccaaccatgacgttgttgtgaatctcgacatctcgacatgcgatgccgtgttattttactacaacaagtggctctccaatattcaggatttctacttggacatcttcaacacatatcttcaatcaagcaatgactactcgacgacaagaagctataattctcgactctatgttcagttgtttcccaactaaccaaagagtcgggggctacacaaatataaggctcaaaatttgacaaattttatgtcaagctgaagcaatcaattaatcagccaacaagtcaactctgggagtcatcaattttgtcttcgcttcagagcagtaggtcaagattaaatttacatgtctgggagtttggagtcatcaaccaatcaactcatatcagattcaatgagttgaacaacagcatatactttcctccaagtgaagcatctacaacagtttgatggattattgtcactgacatcatcaccagcacatctgcttcatcagctctgacattccgccgttgctaatggatgactaagactttgccaacttgctattccgccttcacggttgacctactatgcaaacgctgatgagcgtcttcgtcattatcatcggctattacaccgctattgactggatcaccgacatcgtcatcttcatcaacatcctgtcaaacctctttatcatagcttactctactgctattgataggcaacttcgtcatcatgtttgatcatctctgttgatgcttatcatcattgctgtcggttacgtttgtcgtcgccgactaatttcctcatcttcatgattggtggatttcgtcatcgcctttgatctgcctcgtctgtcaccgactgattattttgctgccatagctacacaactttatcgctgagcgccttcatattcattgctggctgatctgactgctgccgactggtttcttcgcctccacggctgtgcaacttcatcacttttgattggtatcactatcttcactaccaccaatatttttgccacctctgttgggcaatattatctctatattggtcgtcttgtctctatgccaactgcgtcagctaccatcaatgaacaattgtgactacgtgctcaggggcttactagctcaaatacaagtgttataccttcaatttggacttgttccggatacattccacatggattcatagtcatgagtctattttctatgctcaaagactggaccaattattattccccgtaagggctatcaaccgaatacttgcgccagtcgggattcaattattatatttattttggagtatcccataagagataatcactcagatcacatggtctatatcacccgggagcatgttacatgcgtcatcctttaaagggtgtcgaaggcatattttttggcctaggcctaatatgtctgcagcccatattttcaggtgtggcctgtcacgttcttttagggacttaggcacttttcgcttaggccaaagtgcgcgtgatcaagtgcccaataccttaaaatccttttataccgcagttactcgactttttaggagttggtacaatgcatcttaaaaggtgtcaaacagtaaagctttatatagctgccccgctggcttttttatatagtcaaggtgctgtttgggtttatcaagcaattgattggatacaatatcattgctttttgccacgtaagtgtgtatttttattgaccaatattatggcttaggctgattatatattatggtcatttttcaggcggttggtaaatcctttatgagtttacttactcggatgttataccatatatgccatatatttccaggtgtggtgaaaccatgtgtcttttagggacttaagcacatctgttaaagcagtgtgcgcatggcgtatgcccaatactttggaaatttctttattcacagcattcaagcttctttataattgttttgctatgtgaactttcaaagatgttgtcaactttaggttgtacgcatcatattttgccaagcagtcggtatatcacttggatcatattattcggggattcacaccgcatatgctatatattggtatcaagtcacttggttgactataattatcaaaaaccactcggttaattggataatttattccttgactatatgtttagtttgttcagctaatcacatagtcgggggctacacctattaggtgcatctagtcgatgcacctgactttatttttcagccctccacagtcttcatatttggtaaaagtacttcggagaccatggcgaagatgattgaagcactcagctttggagtaatctagttcgagagaagattatcttttcgactgtgaaggtctcaggggctactgtggagattatgggtaccccatacccacatggcatagttatccgactggctataggggataacttatatctatggaatatgtaacagatcatgacttgggtattacgtttccttgtatgttacggaacggcctaaagtcctggtttgataatattgtaaagtagatttaggaaaccgataccgtattggttaaggtttctatcttgtaatcctgccccccaccctatataaggtgggcaggaggccctctagggggcatgagacaacctgatcgtcagatctatactacaccggcggattcaaatccccaaacaggagtagggtattacctctcatcgagagggcctgaacctgtctaaatcctttgtctctgcatccatccacttttaggtctcgtgcgctacctccttttattattgccgaattcatgtttcgacagtgtggctatcaagatggaaaagcggatgggttagaagacacagagtttatacaggttcatgccttcttgatgagaagtaataccctactcctgtccgaggattaatccgctgactattattgatcgtaagatctgagagaaaagttatacccctagaggcacccgaacccctccttatataaggggaggagtcggtgttacaagatacagcccatattcctaacggaatatgcaagtaaagataaattacaatcttaacagactaggatcctcgggcgtttgcttgagacacaagttaataaaacaaccgagtcctttacttaagacattctatctgtatatggtacccctatacctagtcggatatacataccgtgtgggtatggggtatccataatctacacagtagtcccagagaccttcacagtcgatgaaataatctcctctgaaaccattgaacgaaaatctgagtacttcgactatctctgtcttgttattccgagtgcttgaactgaaggctatggagggctaaaaaataaaaaatcaggtgcatcgactagatgcacctaattaggtgtagcccctaactatgtgattagttaaacaaaactaaatatatagtcaaggtatagttcaataaccagccgagtggttttatagataatattaccgaagtaatcaaatagcaaaacatatgcgatttttatccaaagattcagccgactgctttaacctaataagctcaccataaagatatataaagatcagaatggaaaaacgatctatgatctattttggagcttaaaatagctttcgtgataaataatccgagtaaaactcttaaaggatttatcaaccgcttaattaataccgactattaagtttatccagcctaagctgtaacttaagcctgtattcagagaaattaagcatataaatgcgcaaaggaataacagctttggaaactggttgtcctgattaaaccctaacagttttgtggccttataaaaaggtcaacaaaaataacatgacgtttttactgttgggcacctccatatatgcatcgtagaaatttcaaagaattatcgaactgcatagaaaggaatttaacggtattgggctctattattgtgggcaatttagcctaagcaaaaatatgcctaagtcctaaaagaccacaattagccacaccggaaatatatttgggctgaaaacactgtttaggcccaggcccatcagcgctttccgatacccagcgataaaaatcacatcgaaggaaaccccttcgtcttcctcgccacaactgctgcttctttccccatttcacgctgatgtaacagacccacgccggtgaaaactagggtttgcaatcacatctcaatccgcctcctccgaaccattttccttccgcgaaattcctccgcgcaaccaccacatcaatctccccaccaatcgtcgcagccctcgctccagatctcttcattccttttgcatccatggcggaagagagagaaagcttcgagagtcaatgggcgccctccgacgttacggaggaaaatctcaaggagatggtggtgcaaggagtttttccggcaaaggagatcatcggatggcgtccggcgtgcggcaaggctttcccaactcctgacactcatgaggtcgtcgtcttcttgttgacgaccaaatttggtaagatacaaaccaggtccagcattggagtcaatgtggattcggcaaagaattagattcgaagaacagagtctaaattggctgcgaaggcatcagctgtagtctgtatcggctgagatggatcggacagagggcagccgatataactgatactaccgatatagccgattatagcgagatcagttatggaactgcttctagaatcgatcagcgtgcttcacaaggattgccacaatggagataagctctcggataggcaactgtatctattaattagtacattttgtgtaattttcttagagatatgtttgggcaaaagtctgctataaagacttatgtatcttagagtttgttagagataagagttgtgtccggcaaggacatcttatgtattttgggtataaatatgacccgaacccatgtaatcaaacaacaacagttcaataacactctcggcgcatcgccaaccttttttactttcgttttatttcgacgagttcttgcttttgggttgagctgcatcgattccgatcttcaactagaggtaaaacttgttatggtggtttgcgttatcgggattagcgcttccatctttatgacactctaatcttgtttacgtaattcttcgagttatcatatatactttataatatttattagtttcacgatctaattcacaatcggctggtttttactgttagattatattgtgtatccactgttggtatttcttaatgacattactagaaatataattcccagcaatggcgtagaaatactcctggtatattacggttatagagtttatccgctaacgcacggatataccattgtggcatttcacctgagagtattccaaaggtatcgtatttattttatcccatgagaagatcatgtagagagaacttgactaataatttatatattacttgtgataatcatattctaagaaggggttcagataatccaagggtagagtgacacacaagcattagctactcattctcataatatattatctaagctaagtggaaagaaaagagaaagataatctattcctatacttctagtatacataatataaatacattctagttaactgatacactagctaataccctctatccgatgccctcgtggtacttcgagaagccacctctgactgctaagttccttacgacagccagtcatgaccatacaaccggggctaaatacggaggaataccctccctagggaattaacttaggactatatacaggcacggaggaatacccgtactgagctgtcaccatcagcggcccacctctcatccgcagcatataaccccaaataatgatatcccgtaatctagacaccacgtctaaactaccaaatactactctaatatcatcgtcatgacatagtgtaattgcataagcaaacattatacccgtaccaaagcatttcccagataagcttgccgtatatttagtataacatgaacataatgtaaagtaggcattcatatactcggaaagtatttcaataccataaatgtacatagaagagtattctaataaaagtacaaagcttacaaaagaggaaaggaaagctactagggccatacccgaactcttccgaggacttccggactcttgatttctactctgttcctattccaccagctagatactactaaactaaacttgagagaaacgagagagctcttgctcgaggtatgtgagtgaagtgagaaggtgaagggtttatatagcctcccaatgacggttgtgatggttggaatggtcagaaatatcctccaaccgtcattggagctaatccacaccgtccagaagaagcacatcgtccagaagaagccctgcatccaacggcgatgagggaggccaaacctggggccggcccaacgagcccatggtttggctggcggcctcctctgttattcttctctgcagacttgtgaattttggcccagttgatcgtgtcatttctgagttcttggcccattcatacataagtctgattctcgacatcgtccgactgatttatcgtttgagttgatgtcgattctcctccactttctgtttggtgtgtctttcttgtaatatagagtggtatcggagtattagccgatacatgctagatctatttgatcggctatgatataaacatctatataatcattgctttaatgcatatttcaacttaagtgatttatactgtctcggcatgacggccgatctatcccaatcacttagtttaaatatgcatcgaaggaaagattacatgttgttaatatatatctacaaccaatctagtagatttagtcttacattattcattcatgactgccggttgatttcaatatgacatcggctcaaagataaatgatatgtcatcagctgctagccgatcggctatcgtttatggatttaatcccgttttcttgttgtttattcttgttgattgcaggatcaaatcaactggcacgctcacgaacctaaaggcaagatttttggacctgcattgaagttaagcagatcttgcaggccagtgtgtgtttttcgcatcaacacacttttggcacgcctagtgggaccgagtttcgacaacttctcgtcatggctaaaaaacagtcaccgtcatcagcggccaagcctccaaatcctctagggtccaagcatccatcggctgagattggggctgagaacatcgtcctagtcaccatagataaactatcactagagcaaaggcaagagcttgaacggacgatgaaaagtgtgcaagataaatttatgaatttgttcaaggagacccactcaggaacaatcgttcagaagtacaagcttaaggtagttgctgccgatgaacctgaaacaacctcatctaaaggtagcgaagccagaggaaccaaagctgctgcagatagttcaggtggtaaaggtggagaacctaaggatggtgaggttgaggacgtagttgaagaagaggacgctgaggagcaagaagaacccccaccatgcagtaatttccaagatcaagttgattatgccgtgcaacatgctttgatcaatcaatcaggagtgcttgttaacaccttaacaaatatgatcaaatctatggttgatggtacaattactgagcatcaggacaagggaccattttacctgccaggaatttggcagatgcgtaatatgccacagcctcctcagaatcatcttggtggaaatttaaattatcagtatcagccaaattcacctcatcttcattatcaaatgggagggtcacctcaacctcagtttctgccccaatttaattagtatgatccgatccagcagcagatgcaaggagtgcctcagcaaaaaccttgggctgacttgattgcagatgtcatgaaggagcagttcgggcttaagccgaagaatactggaaacttgtatcagcacccttattctgagtggtttgaaagaattccactgcctaaccgatataaagtcccagacttttcaaaattttcagggcaagataatgtttcaacttatgagcatgtcagccgattcttggctcaatgtggtgaggcattggctgttgatgcattaagggttagatcattccccttgtctttgtctggatcggcattcacatggttttttgcactgccttataattctgttcaaagttgggctgatttggaaaagcagtttcatagttatttctacagcggaacccatgagatgaaactatctgatttgattgcagttaatcagaggcatgatgaaaacgtacatgactatattcagaagttcagagatatgagaaataggtgctacagcttggccctgaccgattcttagttaactgatcctgcttttcagggactgatagctccgatcaaggagaaattttcgtcacaagactttgaaagcctgtctcatcttgcacagaaggaaactatacatgagcaaaggtttgcagaagctaagaagagtttcaagaagatcaatcatgtgtatccttatatgtatgactctgaagaggaggatgattccgaagtagcagcagccgaataggtaaggagtaaaaaggttgtgccatgtcaatgggtaaggagttctgggaaagaagaaaggtatgactttgatatcaccaaggctgacaagattttcgatctactacttcgggagaaacagatccaacttcctgctggtcatgtgattccatcggctgaagagctaggaaaaagaaaatattgccagtggcataattctgggtctcatgctactaatgattgcaaggttttcaggcaacagattcaagcggctattgagggaggaaagatcaaattcgacgactcgaagaagccgatgaaggtggatggacatccttttcctatcaacatggtctacatgtctgggagggcagccgatgggggaaaccatcggaatttacagttaaattcgacaaaaatcattaataaataccagagaaaatatgacaggcagcaggaaagatattatgacgaagatgatgatgattttgatccttattgggactgtgagtttttcagattttgctagaatgaagggacgagattgccatctattcaagattgcccaggatgcggtgatactgcagggagtttgagccgatcttacaacagagaaaatcggctgagtcagaaaaggctacctgttcaccagaggttgggaccaattcacaaagattacttccagtatgaaggtgatggtgatgagaccaggaaatcacaatggtgcccttctagtattttcacaaagaatcagaagagaagagtccagaggattttcaggaggtccagcaagagatcaatcatcggctaaaaaagacaaagaccaaataggagtggcgtgttaagagcaaggtcacaacaaccgatgaagttgaggttgacaaagcgaagagattgctcaagggaaaggctgttgcatcgtcgtcggtaaacatggtcttcgtgctgccagtcgaatatgaggctaaacaagccgatgttgatgatgtggaagaagcctctactaggttgattttgtctccagaacaagcaatttttgagaagccagaggggacagaaaatcggcatctcaagccattgtatgttaatgggttcgtcaatgcgaagctgatgttcaagatgatggttgatggtggggttgctgtgaatttaatgccatatactacattcagaaagttgggcaggaatgcagatgatctcatcaagacaaatatgattctcaaagactttggtggtaatccttcggagaccaaagaagttttaaatgtggagttgacaatcggcagcaagactgttcctactacgttttttgtcatcgatgggaagggttcctatagcctgttgcttggaagggattggattcatgcaaattgttgtattccttctactatgtatcagtgtttgattcaatggcaaggtgacaagattgagatcgtgccagccgacaggtcagtcaatgttactagtgccgatttagctttttgggagatggatgggattgattgtctgtctggaaaagtttgggatggaggttatctaaaagtgtccgattgtgatatacaaccaattgaagacggagagcccaagctgttactttaagggcgtcgtggagggtacaaatttctacactaaggatacagtagatgatctcgatggcaagttaggacagggtttcaagtcggctgatgacttggaagaaattgatatgggttcaggagataggcctatgccaacatttatcagtaagaatttatctttagaattcaaaaccaagttaataaagcttttgaaataacatagagattgctttgcttgggaatactatgagatgccaggacttagccgatcgattgttggacatctgcttcctattaaaccaggatacaaagccgatgagatgtaaagccgatatgtatgatgctatcaaggctgagattactcgattatatgatgctggtttttttcagccatgccgatatgctgagtgggtttctaacatagttccaataatcaagaaaaatggcaagctcagggtttttattgattttagcgatctaaacaaagctactccaaaggatgagtaccccatgccgattgccaatcaattggttgatgctgctttgagacacaagattataagttttatggatggcattgctggttacaatcagatttttatggcagaagaggatattcataagactactttcagatgtcctggtgcaatcggcttatatgagtgggttgtgatgactttcggcttgaagagcgctgaagctacataccagagggccatgaactatatattccatgatctgatcgatttgttggttgaggtttgtattgatgatgtggttgtcaagtcaaaagaggtagaagatcacatagccgatttgaggaaggtttttgagaggaccagaaaatatggcttgaaaataaatcccacgaagtgtgcttttggtgtatcggctggacagttcttgggttttcttgttcatgaaaggggaattgaagtaactcagaggagcattaatgcgatcaagaagattcaacctccggaggacaagaagtagttacagtcactgatcggcaaggttaattttgttagaaggtttatatctaatttatctcggaggttggaaccttttacacctttgctaagattgaaagccgatcaagaattcacttggggggcagagcagcagaaagctttggacaatattaaggcatatttaagttcccctccagttttgattcctccataatagggaatgcctttcagtttatacttatcagccgatgagaagtcaatcggctcggttttgatccaggagttagagggcaaggagagggctattttctatttaagtcgtaggctcttgcatacagaaacaaggtattctccaatggaaaagttgtgtctatgcttgcatttctcttccacgaaattaaggcattatttgctatccaacgagtgcaccataggatgtaaagccgatgtgataaaatacatgctatcggctccagttttgaaaggaagggttgaaaaatgggtatatgctttgacataatttgatcttagatatgagtctcccaaggcagtcaaggggctggctatagccgattttattgttgaacatcgtgatgattcaatcggctcggttgaaattgtgccctggactttattctttgatggatcaatttgtactcaaggttgtggtatcggcttggtaataatttcgcctcggggggcaggttttgagtttgcttatgctattaaaccttatgcaactaacaatcaggttgaatatgaggcagttcttaaagggttgtagttgctcaaagaagtcgaagccgatgctgtggagataatgggagattctttgctagtgatcagtcagttggcaggagaatatgaatgcaaaaatgatttattaatgatctacactcaaaagtgccgagaattaatggacagtttttggctggtgactttgaagcatgtctctcaagggcagaatgttgaagctaatgatttggctcagggggcatcagtatataagccgatggtgaaggatattgaggtagaaattcctacaatcatagccgatgattggaggtacgatgtttatcaatatttgcagaatccatctcaatcggcttcacggaaattacactataaggctttgaaatatactttcttggatgatgagctatactgtcggacgatcgatggggtattgcttaaatgtttgagtgccgatcaagccaaggttgtgatgggtgaggtacatgaaggaatctgtggtactcatcaatcaggtcacaagatgaagtggttgcttcggcgcacagggtatttttcgccgacaatgtaagaagattgcttccgatactacaagggaagtcaagattgtcagaaatttggagcaattcagagagcaccagcatcggctatgaatcctatcatcaagccatggccatttagaggatggggtattgatatgatcggtcagattaatccaccttcaagcaaaggacataagtttatattggtggcaaccgattatttcaccaagtgggtagaggcaattcctttgaaaaaaattgattttggggatgcagtacagtttgtaaaggaacatattatctaccgatatggaattcctcagactataacaactgatcaggggtcaatctttgtgtctgatgaatttgttcagtttgccgatagcatgggtatcaagttgttgaattcgtcaccatattatgcacaggccaatgggcaagctgaggcatctaacaagagtttgatcaagttgattaagcggaatatttctgatttttctcggcaatggcatatgagattagctgaggcattgtggtcttatcggatggcttgccatggatcgattcaggttcctccatgtaagcttgtttatggacacgaagcagttctgccatgggaaactacgatcggctcaaggagaatagggttacaagataatttgacaaccgacgagtattacaatcttatggtagatgaaacagaagatctagtttggtccagattaagagctctcgcaaagatgactaaggataaggaacgaattgcttaccattacaacaagaaagtggtgcctaagtccttttccgagggagaattagtttggaaattgatcttgccgataggaactcgtgacaataaatttggcaagtggtcaccgaattgggaaggaccgtttcagatttacaaagttgtgtccaaaggggcttatatgttgcaaggacttgatggtgaagtttatggacgagcacttaatggaaaatatttgaagaaatactacccaagtgtttggattaattcatgatcggctgagtgatgccgatacatgtcagccgatgtgttgacatcgcctttagattgccgatatgagttatatcgctcttagtagttttttcttatcatgatcggttatgattgccgatttatgatggccgatatttgataatatcgcccttagtccaaatataattttatcaatgtattaagcattgcaaaattaggggggaaaatatatatgagaagtatggatttcaaaagcaaatttaagtggttccatacttagagttaattacagcccaagagtttataaatttaaaaagtttacaagtccagctcatccagatacatacttttggatagccgatattgccttctgcctaattcaatctacctcgtcaatgatttgagcgtcggctgcatctattccagggattattttcagagattttgtcagattggctaaatgcttgatggatgccttcaacttggatctttgatcttctgtagcttttggcatatcgacaattttttgttcctcaattgcaatctgggcattacattgttctagttcagccaagagttctatttttctggcctgtagccgatcaatattggcctgaatagaacttggaccagcttctagtccattaagtttagctttctcttcattgatcgaagttctactggctcgaattgtggcctcaagatcctttctctcacgacgatcagcaatcctttgtttagccttctcaagcttgagccgatgttgttcaagatatgctgctggagttatggcatcggctagctcatctggaattctgtcatggatcttaagaaacctgtctctgacagacccacaactggccactagggtttctagagaaccttcaagcatggtcgagatgtccagcaggatggacttgacgtcatcggctaagggtgccaaagctttgctcgtggtgtcttcttcctgatctagaaactatctaatgtcaaaagagaacatatcggctaaggcctgaaaagggatcaaacattattcaaaggtaacataacagccgatatgactttaggatttaagataggcacttacagggatagctggagccgatgctacttcttcttcttcctccacatgatggcttcctgcagtcaatggggtgtgtacactcgatttgggaataggagttgcaggacgaggaggctgagaaaggttaagtgcaagttagcatcggttgtttagataaagcatgaaggtataaggattcttaccgatggagctggtgctggtggtttcttagaagctaacttcttctgcaagggtataatatatcaggaatcagcattacatattaaaataatagatgaacaaataatgtatgcatacccttggtttgtaagtatggcgtactggtggtgatggtgttatctgaggagcaggaggatcggctagaggtgttttctctcctatttcactcagattttcagctgcttcattcacagcttcttccagttcttcaccctccaggaattcttccacatctgggttctatggctggcagatcatcggttgtagctttttgtttcttgggtttcttctttacaatcgatggtgcagcagccgatttagtcttcctctttttgccagcatcaggtgcaatcggcagacgcagcagaccatgcaatagagtagaggtcttgggggcatggtagccgataactggaggacttaagccgccgctgtttgcaagaaaacctggtgcatatttaatttctacaccacttttgctgtgatggggaggagaagattctgttgcctgaaaaatatataaagctcaaaattagaattgatgcatcgacttgcaattgataaaattgacaaaaataagatacttacttgagggacagctttggggaacagatctataaggtacatcgaagccgattggtgaaacaagtgtttcttccattcaatccaccatcggtcaaaggttgtgctcctcaacatccttagcttgatctgatcaatagtgcccagaggtggtccaggtatatttagcagccgatccatcatgagtgccaatgtgatttctcctctgcattagattttatcagcaaagaacaagcttatcggcagctggcccatacccaattgtcttgcagcacttgtcggatgatagaattcataagttacttggatgtttttgccttgatggataccgaccggaaatatgcaagggctgatggctgttgaaaacaattctctagatttgtcatatttttcggaatttatttcatcaaaccgaaaatcacctggcatatcaaaggaaccagatccttcatatgcaaactagatcctagtattccttggaaatccatcatagaatttattgaaccattctctaaaaagttcagccgatagcttggatccagcataggtagaagttgcttctccaaaagacatgcatcggcatgtattgatttcttttccatcatcgccgatgatcggctcaaaccttgggaagctgacatctgttagtagtggccgattggcaatcatccaggtgtgcaagtttaaccaaatttgaagtagccaccaaggacctcctgtaccgattgataatccagatgccatcttggttattgtggtattcagagtctgatacatatatccaagtagatatttcccaagggggaattgtttcttctctaccaaaatttcggctatgtgttgccaatttgcaataggatcacagctcggaccacagaacagaaatttttcaagccacatcatgaggaaggctacatgttctcgtgtataaatcggcccagtacccatgttctttgcaacatagcttgtccagccacctatgctcctggttttgaacccaaaggtgggtttagtgttcaaactaactgggttagccgatgatgtaatatctaaatcagttattatggtaacatccaggagagtgggggtcattggtccttgagaaaagaggaaaacattcatggctgtggaccaaaaataggaggtagctaccatcatgagttcatattcggccatatctgctgcaataagggccaaggcttgggatatgccgatttcttcctaatgggtcaatttacaggctgacatcctcatgtaccaggcaggccagctctttttaggcgatggccaagatttgaaagtgttcttccaaagacctaagttgggattggtgaatctaaaggggattcggttggtttcaccattaataaactctatggggtctaagttgccgattgggccaaggaaaaactggtattcatcagttatattaggaattgcaacctggtgagagagatgctacagaggaaagaaaattgaagattgagcagaagaaaaaccaatcttgtgcggtaagagaagagatttagccgatgggacttacctcgatgtactcagcagcaggtgcgtccgatgggttggcagaggttgacattgttgtggcaaggattggcgatgtgaaggaatcgcaggagatcgcctttaggtcgccgaaaaactcgaaggtgtcgccggagagcttgatgaaaggattggggaaagttttttgctagagcggttaaaatggagctgacaccatgaaacgggcaaagcagtggttactatttaaaagagcgtgcggtaacggccaaaacgagatcggcgtcggaaatcctagttttactcagaaaaggagattgagcaaatccgcaacattaataatatagcggacttgggggcatgtgttgacaaccaaatttggtaagatacaaaaccaggtccagcattggagtcaaagtggattcggcaaacaattagattcgaagaacagagtctgaatcggctgtgaaggcatcggctagagtctgtatcggctgagatggatcagacagagggcagccgatataactgatactaccgatatagccgattctagcgagatcagttacggagctgcttctagaatcgattagcgtgcttcacaatgattgccacgatgtagataagctctcagataggcaattgtatctattaattaggatattttgtgtaatttccttatagatatatttgagcaaaagtctgccgtaaagacttatgtatcttagagtttgttagagataagagtcgtgtctggcaaggacatcttatgtattttgggtataaatatgacccgaacccatgtaatcaaacaacaacaattcaataacactcttggcgcatcgccaccctttttactttcattttttttagacgagttcttgcttttgggttgagctgcatcgattccgatcttcaactagaggtaaaacttattatggcggtttgtgttatcgagattagtgcttccatatttataacactctaatcttgtttacgtaattcgtcgagttatcatatatactttataatctttattagtttcacgatctaattcacgatctatcattaatctagattatattgtgtatccaccatctcttagaggttttcatcatcttgtctagatcttatacttattttaatgcttaatgctgcatcggttaggttcgatctattaagtaatatttatatagtatcggagtttcagctgatcttacctgatttagttactttacctcatatgcttgattgtcatgctaaatctgccctttatattaagatcttatcgcattaggatatattagactttctatttggtgtgtcttgcttgtaatatagagtggtatcggagtattagccgatacatgctagatctatttgatcggctatgctataaacatctatataatcattgctttaatgcatatttcaacttaagtgatttatactgtctcggcatggcggccgatctatcccaatcacttagtttaatcacttagtttgtgtttttcgtatcaacacttctctaatttttctatggcggtttttctcttccaacgtcaaaattcttcacggtgatccttgaattttatgcaattaacatatatcacctcaaccccaactccatcctccacattgccaatttcatccatgtttgtgaagctttcctgggcattcggcagccctttgcattatttcacagaatcttcttcttgaaggcgcagcccaacaaaaataagccttgtattgttgggggatctggttttcaacttcgtggcaccctatgtcagaagtacttctgtaacaccccagaaaaccacctaagcctgggatgccactaaacaacctcacataagtgccaaaacaagcaaatttcggcaacaactaccttagacaagaaaacatcgcggaagcatcaacatatagattaaggttatgatacaacaaatgactgacatgtagggataggcttgaaaaagtggctaatcaatggccaacaactctagtatttaattaacccattatgtctaaacacaaatattcttatcaagatattacaataatcatgactaagtgagatcatgtcgtgcgactgtgtagctaatcccatcccttcatgcaaacatgtcacagcaagtacctgaaaagactataatggggtgagaataaatctcagcaagcaaacagctttaacaagctatttaaaccacatgtttattatataaataatttaaataccaagttatgattcacataaagacaagttcaaaatccaaggaactaaaacatcatagcgtcaccaatcaaatccatatactcacaaatcccagagaagaaaacacttctcaaagacatcttcgatcaataattttcataacgtcccgcaatatgtgcatatgcaatgcaatgatatgtactcatgccttcacaaccaacaaggtgtgaagctgcatcttattacgacaatatacgatgatgtaccggtacggtcgcaaccataggttcacgacataacttcaaatgcaatgcaagtgatgcaaatgcagtatgaattctagagtataacatcggaaccacattccttcgatggagatcagtataaggttattataaccaagagcataaagtataactataaacagcgtaaaatcaataagtatgattcagataggtaaatcctccgtgtaatatataataatcttggttgatgatatataatttcaacgtggaggtagaatcaaataacaagtcaaagctgtagcaaaccaccgctatgtttacttgccttcaccgatgatgagatgaactctagttgcattccgaagtggcatcacctgaataaacaccggctcagactcaaacaacatgcataatcattcaagaaacacacatacgcttcctacgctgggatcccaccccaaacaacataaagcaaataaccgataatcttcttataaaagcagcatagattaacaattcgatacctccaattctacatcacataacacagcaaaatatatcatttctgacatctacagaaaaagagttacaactttcttttagataacaaaattgaattcttccatttagctggcctaaaatatggcacaaaacagagaagtgcatctgcccagaaaactgtgcaacaaccattcaaaagagcactgacaacaaactacaagataaaagctaacaatttttatgtaggaggtagatcacaacatatgctacaacttctgtaaaaacaagattctctgattccatcattaagatcctctaaaatccctctgaacctcgactacagaaaaatgcatctatattcagacagccaaattcagaaattgatatctcctaaaccacttgatataaactcatgccatttggtcagaagatagatctacacgttatctacaacttttgtatatacacttttcgcaggaaatcccattatgatggccgaaaaggcatccaaaccagaactgtgcaggggacagatcagcaaaaacctggctgaggaataaatcggttgatcccaaacttactcgcttccaacacttgatctaaaccctaatagaaaaccaaaacagggggaaaagatcatgtattagatacctaagcctccatgggcaacggcaaccaaaacgcctcatttccttcttcacctcaattccctccgcttccttctttccctttcttcttcttcccttcttcttcctaggtctgcagtagggcaggcatggggaaggtcgaccagagggggaggtgggcgcccccagggtaccaaatgacggctatggggaggtggggggcacctcctagggttttgggatgtggagggggcagctgggccttgggctggccataagctagcccagctagcatatacctattgtttttcttctaatttcaaacaccaaaaccttacggacttccaatatatcctctacggtattctattttttctagggcattacaacttctctatgccctttaaaacatccaacaagggctagcatgctaactggttctacacccaaaatcctaatccggcgctgccgagtactcatgcctccctccaaaatatgaagagacctagaattcgctcccaaagggcgatgaggctgcccaagctcttgagctattggatcgtcttttgaaactgaaggaacagggtctccaagggtaacagatcactcggcacttcatcaagtgccgactggctcctattaaagagaggtctcgcacggccttcaaatatgaagggaagaatgaccccaatcgagaagaccccgactccctggaattcaaatttatgaaggaggggatgtataaaattttctcatctggcatagtggtcagcttctcgcatcaattgccatcggtgccgtataacgccttcaaccctcctctagcggtaagtaacaaaatgcttgaatctttatcattcttgtcagttcttgaaaataaactttgaactgttatcttcaggagctgatcctccaactgcccaacgtcgatctccacggtgtcctcaaggccaagctaccgggggcccgaagatccaacccggtacgcagaagagtagcgcaaggccgactgatcaggcgggctctagaaagaggaaaatgatttacgatgatgacaatgacgccagcaacaaggagacgactggaaaatagcctaagaaagccattccgccaaagaagaaaacaaccagtcgtccaatgccaatgatccgaaagtcttctaggtatgaactcgccatgatattcataaatatatcttccgaaatcaattggtgatgtcttctcaaacttcaggaaaccatcggacattgattcgactggtaagagctccgagctagctgccaactcggaaacagctagagaaaagactggttctgccgctgctactaggaccgaacccttcaaagaagaccatccgattggcagtcagtcggccaccggtgaagctgagactagcgacgagcccccgactggaaaccagtcggcatctgccgagacaagcacaaaccaggagcccctgactggaaaccagccgggtgaagatacagagaaccccgagcagccaaataaagacatccctgagacagaagggcaagcaagcagtcctcccttgaaccaagatgctgatgctggacctgaagcaagcactttcgataaggtagaaggacctgcacggccaccaccaaggattatcacaggtaatactcttcctagtggatttatatttggaaaaatcttccattgcagtttcattgtttttcatataaataaaggcccaatgatcagcgacgaagaggaaattcttcggattcgatcagctgaagattctcgaccgcctattttagttaaatggtgggacgacgagatgcagccgcagggcattgtgatcaataagccgctagaagacgaggaagtgtctttactgacaaagactcttaaccaggccactcgtctggcaaatgtaattatccgatctttagtcttactcatccaatcggtgaatttgttgagatgaatcattatatgcagagaatccatctttggaacgaggcgaaaaccgcgacccttgagaagcttgttcctcatcttggaactctggaagaaaccagagataaactgcacgaaaccaagaaggaggccaggagaacagaacatacacttagggaccggatcgccgagctccaagaagccaattttgaactgagtggttcttcaaaaggtaactctatttctgctcaactcattctgacttgactcagtgactaaatagacattgtccatgttatagtccaagctgccaaaattgtcgagctggaaaggcaagttagtatctggtagtttagacgtggtgtctagattacgggatatcattatttggggttatatattgcggatgagaggtgggccgctgatggtgacagctcagtacgggtattcctctgcgcctatatataatcctaagttaattccttggggagggtattcctccgtatttagccccggttatatggtcatgacgggctgtcgtaaggaactcggcagtcaggggtggcttctcgaagtatcaggagggcatcggataaagggtattagctagtatatcagttaactagaatatatgtatactatgtatactagaagtataagaatgagttgttaattcttgtgtgtcactctacccttgaattatcttagcccctgcttagaatatgattatgacaagtaatatataaattattagtggagttctctctacatgatcttcccacttgataaaataaatacgatacccttggaatactctcgggtggaaagctacaatggtatattcgtgcgcttacagataatctctgtaactataataaaccagaagtatttctggcgccatttctgggaattatatttctagtaatgtcgttaagaaataccaacaagcatttctggcgccgttaccggggaagattcataatagagatttcttgaactaatactttatatttacctctgtataatcatttcctttgcaggctaaccttggttgttttcactgttgttgtggaaacagggtagtgcatgactggtttcaacctgccggaaaacttcaaagaaaatccagaagctttcttccagagcgtcaggcaacgagtcgttgctccgcagaaagctctaccgacagagaaaccagtcgtaccagcgccaccaaccttcaagactatggccagcaagactccgcgagttcgctgctccctctgctgacaatgtggccattgggccgcaggtcaacataggggacgtggatttcgacttgaagtccagccttatcacgatggcgcaggctagcccgttctgtggcaagcctaatgaggatgccaatgctcatctgcaatagttcctggagatttgtagcacgtacaccatcaagggcgtcagccccgacgccgtcaggctacggctatttccgttcttcctcctcgggagagcgatgcagtggttctataccaaccgtgctgctatcaacacctaggacaaatgccccatggcattcctcttgaaattcttcccgatgggcaaaaccaatgctcttcgtggaaggatttccagtttctagcagacaagggatgagtctattccggaagcatgggagcgtctgcaggaatatgtggccgcctgtcctcatcatgggatggacgactggctgatcctgcagaatttttgcaatagactcaccccaatgtcccgcaatcacctggacgcggcatctggaggagctttcttctctaaaatggttcaaggagccgttgaactcatagagaggatggtctccaatatgggttggagcgaagaacgactccaaacccgtcagcgaggcatgcacatcgtcaaggagatggaactgcttgctgccaagttggacctcctcatgaaacgtttggacaaccacgagaaaaggccacaaggcaccgtcaaggccttggactcacacgtcacgtgtgaggtctgcagtggcacatgtcattctgggaatgactacccagaaacccgtgaggaggcaatgtacatgggaacaacaacgggtaccacaaggaagtcaggggtggaaccaaccacgcccatattataaaggaggtaacaataacggtaacatctccaaccagccctccttgaaggatcttgtttttgcgcaagctaaaactactgattcgttaagcaaaaagcttgctgccaatgataaggtcctggaaaacataaatgtcaaattagatggctttgcttccgcatttcaaaattagctgagctttaataaaatgatagaaacccagttagctcagttggcatctttagtccctgcaaatgaaactgggaagatcccggggcaacccgactcctccattgaaaatgttaaggcgatcacgacgaggggagttaaatccactcgtgatctgccgtatcctaaccctgcaggaagtgaaaggatgtcaaaagaagcgccatctagtgactcggctgacaaagaggttcagccagaaaagaccgtgccgcaggagtactgtgacacacggttgaagccattccctcagtggagtaggaaaccgtcagtggacgagcagttcgcttgttttgttgaagtaatccagaagattcacatcaacgtgccgttgttggacgctatgcaagtgccgacatacgcccgttatctcaaggacatactcaacaacaagagaccgctcccaacaacggaggtggtcaagctgatggaacaatgctgcaacctaatactccacaagctcccggagaagaagaaagatccggggtgtcctacgatcacctgttcgattggggcacaacaattcgaccaggccttgtgcgaccttggagccagtgtcagcgtcatgccaaaagacgttttcgacaaacttaacatcacgatgttgtcaccgacaccgatgcgcctccaactggctgactcgtcagtccgttacccggcagggatagcgcaggatgtgccagtcaagataaaggattttttcattccggttgactttgtggtgctggacatggacacagggaaggagacgccgctcatcctagtgcgtccgttccttagcaccacaggagccaacattgacgtgggaacggggagtatccgtttccatatcaacgggaaggaggaaaggtttgagtttcaaccgaggacggaacaatgctccatggttagaatcaagtacgggccaaacccgcagaatattcaagtggtcgaagtggagcgacccaaaacggatagcctggtggaattcatgcaaaatttcctggagaaggaaacaacgatgaccaggaaccgttattagaggatgccggtaaaatcacctgtaccggctaagaagttagagcagctggctcagaagaagccgtcttccgcatcgaaatcaaagaaggtgcggaaggaaaagccaaagacgcccgctccatcacctccgcgcactaaactgaaaggaggaacggtcctgcacgtcagacctaaaatgacgcgaccttcgccaacaggtaaattggtatgtatccgcatatttgctttcaacaatttgaatttttgcatcatcacatgtttaaatttcaaaattgcatttaggatttttttaattttgaggaaattcttcaaatgaattttttagagcaaaccaaaataaaattttcaacgaaaattccctatgccacgaccacactgaccgttcaaatccaacggccgaaagtggggccggttgggcctaccaggggttcggccaaaccggccaggcaacgactccctgccactttttgcagggtaacggcttgtgggtcccacatgtcatttctgaccgttatgggcaccctataaaagccagccggctggtgagggaattccatcccatttcaacacattttcattccctctctaaagtttgctctcaagttcattcaagctttgatagtttccctcaaattcaaatttttagttgcatatatacaagttgctttggtgaaactaaccggcgggtaaaactcttgtcattcctaacccccgccgagttagtccgttcttgcttcattgtgtagaatgaggaggcgattgtctcgtctgttcaaggggtccggctcttcatcaagtcatcatgacgggtccagtactcgttcatcagctgatgtctcgatggaagacgccgaagctccacgacgactcctgaacgacactgacctcaaccttgtcagtgatcgggagagacaagcctactacatgctgagcgaccgggagtatgctcacacgcgagaatactcaccggagctgctgaaaaagataggtatggatgttgaatttcgttctatttggaaagctattggttggcagagatttgctgtggtagatgagcctggttctcgtttgcttactatgcaatttttgtgcactttgaaagaaatagaagatggtatttcttttcgctttttccgtgaggagttcacgctcacatggaaaggcttaagtacattgttggctttcacgattcctgtaagattgatctccagaaagaaatttctggcttctagaaaaataggttttggaaagatatttctggtgctccaatttgcaagaaacctggaacgaatgatatccatcatcctacacttaggctcatgtacaaatggattgctatgactttgtttcctagaggtgatcagagacccattaggggagatgaattaattatcatgtttgccatggttagaaaaatcaaaattgctcctgtgaaatgtatgataaggcaatggttcgaaagtataaagttctctactcctattgagtgcacttctctgattactcggatagcaaaagggctaggggtcgttagcaaccaaattgtttttatctcagccgctcgtccacatattgatgaggcttatctagtgcaagggcatactttgaaacatggggcagatggatctttgatatactttttccccggttgtacaaatgaaatcccgttgccgaatgcggggtatcatttgtacaactgccatgaactaaccattcccctgcagaccatagaagaatctcgtgcaggtggaacatacagggagacgcgcaacatgacaaggaacgaacgataaagttcatcatcctcaacacccgtgcagatgtatgaagcaggttgagcaccaactggggatgcacccggatggacccaagctccacgacatagcatcggagtctcgacctggacaagcgccagtgaggaccggtgacatgcgcctcatgacatccaatggggggacaatcaaccctccagatcaagagatgtgcctccatctccaagtgaatggcgctcaagttcctctcgttgggacttgggtgaaatcactaggaaaatagacacccttgatatgcagatgggggagatccagtacaacctcacggaacacatagcttagacgcaagaatggcaataatctgcagatgcccagttcaccaacatcaataacatgatgcagcaacagcatgatgaccttcaagcgtactttcgctttcaggggttcaatccttatcaaggaccctgagcgaaagccaagcttaggggaagacatcgctccccccactaaggtaacttgtatcccattacatatttccctttccaattgcatatttgcttcccaattgcatcttataaaacttgaaaacaacataaaaatctgcaaaatagaaaataccaaaaagataagataggtttgagtcatgctatgtaagacaagctagttctctttgttgaaatgatgaatagttgctctgttttatatctctaatatataggttcttggtaagtgctctctcaaaggttaaatataagtagccaacaattatccaggaacctaaggtaaatgggctgcacttgctgatttaagtctaagttgttgcgagatatgaaataataaatatgagttgctatgatcctgatactagtttgacttgaattccagatgttttgtttttcaaaatgataaaattgaaagttcctcatttggtataaattcctaccaaatccaaaaatatgctatcattattaaaccatatacattttggttgcttgacattccattgaactttgtcgaactcttgtgacttgtttagatacttctcatgctctctgatcaagatcatacacccacatatatgcacatgctaaactcctacactgggagctaaccaatattccattccatttccatattaccaccaaaataaattctctatgctttcatgtgttttctcctcttaaaaagaaaaatccttttgaaaaaagagagagaaaaggagggaaaggcatggttatgaaaaaaaaataaagttatgctccatcaagcatgagcatgattgaaaaaaaaatgtagccatggcctctcctaattaataaaagaaggatttttgggagaagaaagtaagcacaaaggagaagcatttttcttttatttttccccatataccatttccaccatatatctcacacattatgcatgatcttgatcttgagtatgtttagttatctgctctagtctatgtttttgacttagtaataaatgtgaatgtaagtatgccatgtttgatccctaccgagctccacatacaacccttagagtaggaatcaacaaggcaacatttggtgaggaaattcatactgatacacttagagagactgagtgaatcatttgaggaacttgggtttcttttgcaaaaatcatttaaaaacttccggaataagagttgaataaagattgggtgattggtactctgattgatgttttgtctttcaaccgcccaaggcaaggagaagtagtgtctcgtgggaatcaagggtaagggtaagccaccgtgccaaagattatttaatctgagagagagagtacatataccttgcacctatatctctcagatatgcagcatagtaacaactcctgatcaacaactaatctttgttcccttttgtccttcacttgggacgagtaaaggttcaagcttgaggggttttgttgacggtcgttatcgattagtttcgaccgtcaatattaccaaaatagaggaaaactaatgatgcttacaatgcataaatatgttagaataataatattccactagtattaggtatactaacctcttgcagggaatgacactaaagtggaggagaatcgacatcaacacagacgataaatcaatcagacgatgtcgagaactagacttatgtatgaatgggccaagaactcagaaataacatgtcgcgaccgagaaaaatacattttcccgaacgctagtgtattaatccccatcccaggaaaagccgaggtacaccaaacaaacatgatacaaaaggcacatctttattatatcgataatatttacattattacaaaggcacttaaggcctgacaatcaaaattaaacagcagcggactagcgggcctatggctccaacttcataggcgctcaactggggtataagccaggactccacctaagacttcttctccaaagcttctcttactgaagggggggaaagattgagcaagaatgagtacaaccacagtactcaacaagccacaccggcagatgcatgattaatgcaagggggtacaaggggtaataatataggggttaagttttacagaaaacggcatttaaaagtcacttagttgcccaaagccattttataaagatgatcctagagttacacagtgttattaatcaaggccgtgaaccttcacgaacctgccttaacctaaggcctacaatgattcagaccgaattggcaacccgaccctgggtcccagctcgtcccaagccaacccaggccacccattccacattttagttgttaagcaggttttaagaattaaaacactaacttgggtacattgctaggcttgcccataaccgagggcgcgactattcgaatagattatactctgatcagaggtgtacatctttacccacaagacacatcttcctcacgtgtaaccacgtgccacataccaccatggtatacggacggaagacgtgacatagttcccaacccatcctagccataaacaagagtactgacccaaccccacctacggccggaacctccgggacaggtaggcaggattgagcccctagcagcaggacaccagccctgtgacatgacatctcgactaccgggccgcagctcgtgtagcctttatttgtcctagagatgtccatcgacccccgacttcatccatctccatccgtgtacttttgtttataaccagactgagccacaaactaagccttacccactagacatgtggaagtacggtagtgctttgcaacagaggcccgagcttaatccttatagtacccgaggtacgactaacaaaacccaaccacgcacctcgagcccagcctaaaaccattttgggggttttgaatagagggggaggtgtgtgtccaattccaacataagccaaccattccatactgtccaaatgatatgagaattcccaaagtctaaagttataaaaccacctaatgttgcctaattaatcagcgaagcatctacctaaattcatactagtggaaccatgaatagagtacccactagttggggttttattttcctagggtgaacaaggtaataataacaatagcaataataataaggtcataacaaagataaataaataggcatggctaaataaaacaatgataatgcgggaatttaaataaagcgataatgcattaatttaaatcaaaataattttataaactgggattcaatatgttcaaggatgatgtgacttgccttgctcagagataacggccttccgaaccttcggcgacgaccgcaaaccacgcttcgggaaccttcagaacgacgaacactacgcgaagcacacacgcaaagctacaagcctataaagaagcaataacaatatataaaaagaaagcacagggttctttaggttataacaaacattaggagacttgaacggatcgattcggagctcgtatgaccaagacatggtcatccgaagtttaatgctgttatatggagatttgcggattattataattaggtttttcaactataaaatatgtgcaagcgctagcctggagaagacaggaaggctgcgctgttgacatgcggaccccacatgtcaacctaagggaccacggcagagcgggtacacagagacggtccacgggtcgacagaagcggatcccgtgtgtcaaccgaggcgagtggccaacaaacggactccactagacaccacacggcctgcacacgtggaaaccacgcggctaccgagcgggcacactaacacagtcaccacacgcacaagcgaacgactaccgacaccggtacacgggtaccggggtcgacaaccgcacaacgggcacggatgacaccgaaaggacgaggacggggcagcgaaggagagatccttaccaccacgtgacgaggcgagggaacgacaacgacgaacgggtgcggcggagacggccgggaatgacggagacgaaaggcgaggggacgacttcagcagcgatccttggatgaaggcgagacatggccggcacgaggcttgacgacgcggagccgaggacgaagacgacgacggggctgcagcggctcgcttgatgaacgtggatgacgaacgcgatcggcttgacggagagatgagcgacacaacgagcgaaaccgggaacgacgagaggacgacgatgacgacgatcggggccggcgaggaggcgacaagggcagccgtcagcggctgcacggagacgaggatggcgtggaacacgctgctgcgatgctgatgacggaggcggcgccgcgagatgacaagccagcgaggaggaacgatgacgacgatgacgaacaccggcggggttcggtcgaaggggaggcgaggccgagggcgaccttgccgctgtgatgccggaggtggagatggtgacgtcggccggcgcacgggcacggcggaagaggctgccgaaggcgacgtcgacgaggaggaaggagaggtcggcgcgggcgacggcgttccggcgaaattcgggcgacgccgtggcctggccagggaagaggatggcgccgcggtgccggggaaggaggcgacgacgacagccaccgcacctgcgaggcggcacaggcggctggaggcggtggagtggtggcgacaccactaaacgtcgacgaggacaccgttccggcgagcttcggtagaggggacggtgaggccggtgaaggggatggcgttgcagagccgagggaggagacggcacggccggacggcgcgcgggcgaggcggtaggggcgactggaggcggccggcggcgtgggagatagaaggaggacggcggggagaggcggggcgaccacgggagagcgcgggagggggctaaaactggagaacgtaccgagggggttccattttataggcgcggggagggagccggccacgggaggagcggggaacggcggcggaaaagccggccggcggccatggaaggcagccgaggaaggcgcgggcgttcccgacgattgggggcacgaatcaagggggaaattagggggaattgaagaggaaggaaaggggattaattccccctaatcaattttggaattcctggtttgaatcgcgtggatttaggggaggaatcgacgctagatttcacgggagagagaagagagagagaggatgccgggcgggaggaaggagacgaccgggcgggtgggacccatcggtcaggcgcgcgtcgtcagcgcgcgcacatgcgcggcacgggcgggagggcgccgctcggcttgggcaggggcgcggcttgggccgggtggccggcccaggaggagaggagggggaggcggcctgggggagagagggaggaggagggagtgggccgaggggaaggagaggaggcccaagagaaggagggagaggaggagagggagaggaagagagggaggaagagaggactttggccgcgggccgagagagagagagagagggaggctttgggccagagggaggagggggattatttttaggttttctttttaataaactttgttaattgttgttgttgtttaataaatatttccggtgctctgaaaattcaagtaaaatttgagggctccttttagaccaaggagaatttaacaaaaattctccggccatattcgaatttttcttgtacatattttagtgtttgccaatttcttttcgaattttaattaattctattattccttttagaaaatgatttttattttgggatgaatttatcaggacgtgacataacacgacacattgggccaaaattcacaagtctgcggagaagaacaatggagaaggccgccagcagaaattgggctggttttggctggacggttgagataaagccccaatgactgttgaagggtattaccgaccattccaaccgtcacaaccgtcatagttcagctataaaaggacttcaccttctcacttcactcacacacctcaaggaatagctctcttatttctctcaagtttagtttagtagtatctagctggtggaatagaaatagaataggaatcaggagtccggaagctttcggaagagttcgggtatggctctagcagatttcctttcctcttttgtaagctttgtacttttattataatactcttctttatacatttatggtattgaaatacttttcgtgtatatgagtacctaccttacattatgttcgtgttatactaaatatacggctggcgtatctgtgagatgctttggtgcgggtataatgtttgcttatacaattactctatgtcatgacgatgatattagagtagtatctggtagtttagacgtggtgtccagattacgggatatcattatttgggattatatattgcggatgagaggtgggcagctgatggtgacagctcagtacgggtattcctccgcgcctatatataatcctaagttaattccctgggagggtattcctccgtatttagccccggttgtatggtcatgacgggctgtcgtaaggaactcggcagtcagaggtggcttctcgaagtactaggagggcatcggattgagagtattagctagtatatcagttaactagaatgtatgtatagtatgtatactagaagtataggaagagattttcttactcttttctttccacctagcttagatcatttattatgagaatgagttgttaatgcttgtgtgtcactctactcttgaattatcttaacccctgcttagaatatgattatcacaagtaatatataaattattagttgagttctctttatatgatcttcccacgggagaaaataaatacgatacccttggaatactctcgggtgaaatgctacattggtatatccgtgcgcttgcggatgatctctgtaaccataatataccaaaagtatttctggcgcctttgctgtgaattatatttctagtaatgtcgttaagaaataccaacaaagccataaccatgaaacaatcacggatatccaaacaaacaacctgaaaccgaaaccgacacagagtcggccggtcagatcgcgggctggccggtctgactgctcaatacacgtcggtctgatcggcagcacttgcccggtctgaccgaaccacatccagcagtacctgtagatcacctgtgaaatccaatcatctccaaaaccacttcgcaaataaattccaaataacaaaatcaataatttccaatacccaattgttcatcacagaataataatcaaaaacacctttgattttacacaagttgccaacaaacaatcaagaggattttcctactcggcactatgagaaatctggtatgtttactgggcgaagtgcttacaagcttgctctgaatctgagtgtgatgcagtatgtaggtgcaagcagttctgcaaaagatggagaaaggtagatatgggcaaatatttggtctgcacaggttccgcctaaggtgaaaatctttgcgtggaaactcgctttggatcgacttcctacacaagaaaataagcatcgaagacatcttgctccatgggccatttgtgttatctgtggttttgaagctgaaagcagctatcatgctgttcttcgctgccccaaggcacgagagttaaggaaggaaatgaaagcctactggcacatcccaagtgagaagaagttggagtatactggtacagattggctgcttgttttgcttgattccctgtcacctactcacaaagcacaactcctgttgcttttctggcgagcgtggcacattaggaatgatgctgttcatgcacaaggtagagaagaggttgctggctcctgttgttttcttcgtacttactgcgacattctttttcctatccagcaaaatgatatagtcaacaagggtaaaggaattataggagttaacaatctaaatgttcttggtaaggataagtcagttagggttgcttgggagaaacctgaacctggctgggcaaagatcaatgttgatggggcctttatagctgagtcaggacaagctaggataggtgttataattcgggatagcgcaggtttacctctgttatcgtcctggagaacagtgacccgagtatgctcagctgaagaggttgaattgctagcctgtaatgaaggcttgaagcttgctttagaatggattagaatgccagatatcctcgaatcggattgtgttactgctattaacatgctttctgttaagtcttctgataaatctaggtggcattctttgatcacggaagttaaggggatgatgtgtcttctccaagatgtgaagctccgtaaagttggaagagggtgtaatatggtggatcatgaattagctcagctagctaggagattaaatagttgtgcagtttggcggtttgatgctgctctctgtattagaacttagaacttctgactgtaatctctctggttgagtaaaaaattcaccctttccccgcaaaaaaaagaaaggaatatgaggaagatttcagagagagctacaaattggacgtgggcgcccacgtcatcatgacgtcatcctacatgtatgcatctaagcgaactttaaactatttttttctcttaaattatttatccaaatcatgatccgattgcactattaaatccgttgcaactaaatctttaaaacaaaaccacacatggatataatccgatgaaaaaattagcttattattaaactattttttaatgttgcacgctgctgcaccaagtatatcggaattgtttcactaactagatcgaaaatgtttcatcggacgttgtttcgccttatatgaaaacaatgtttcagcaaatagcgaaaggatgtttcaattcactgcaacatttgattcatacatagtgaaacattatgaatacactaggtgaaacatttttttgtggaacaaaaaatgaaacggattcctttaatagagagtttccataatatgtgggtgatttgttgcaaaagaattgtttcaattcactacaacatttgatccatacatagtgaaacattatgagtaccctaggtgaaacatttttgatgaaacaaaaaaattaaaagaattcccttaataaaggagtttctataatatgtgagtgatttgttgcaatggcgtgcatggtggggacacgtggcgggaatggcgcgaggaaacgtgacgggcagggcgcggggcgcccgattttactcccccacgtcggacgcccggttgtaggtattcccggaagatttcggtgcaaaagggctgggataagtttaagatgcacgatgatgcaatccagaaaacaatttgtccaactattcctgtaattacaactccttatgtttgcaatacattcagacacatgaaaaacatgtgtttgtgcttgcaggtgaagaaggaaataataataaatgcatgctcatgatgctcggaaacaaaattctcaggacagacttttgggcgtaaaatctaatccatgcgtgcacatggccacatgggttagtcttacggacggcgcgacctctgccgaagccgtcagattaaagccatcacgtgtgcacgtatgcatgcatgtttttttatctcgacgcttttagcttgagagttcaatgtgagtctttctaacttatatagtacttgtatatttttaatattggatgatatatttcaaaccatgtattgtttttaagatccgttttaaccattgaatcccacttaaaatatatgataaaatgagtatactattgaatacattgaaatatttaaaatccaccaggtccctttccctgtttgtgacatgcccatgtgcatttacatttcatattggattatttggcacaaaagaaatcaaatatcaaaaacaagtaatggaaggtgaccgaatggcataaatctaaagtgtggaaactttcagtagtataccctaaacttatcactagtgcagaactgatcttttacagtggtacccaaaataaaaatatttcggttagattattagtaccggttctaaaagtccgagtactaaaaaatgcatctttaataccggttggtaacaccaaccgagactaatcatggaggatctttagacccggttggtgttaacaaccggtactaaaaacaccaacctggactaaacatatttttagtactgattggtattaccaaccagtactaaagatatctccagggttacactactacaaaaaccctcatagagaatggcttataggtgttggttcatttaaaaccggcacatatggagcttttcccaccttcctacgacggaaaaacagagaactgacacctttaaacactataggtgccggcacctataatatattataggtacccgtttttttaaaaaaaccggcacctatagctttgagccgagcctgcgagccgagcccatcagaaccgcacaaccacacccatcgcgcgcgtccttatctactcgatcattctccgcctaatccatctaccgtctctttctcgtctctcagctctcgggtctctctccctcctgtctctctatctctctctctcgcatctctctccttctcccccctctctctatctcgtggtgcctgcccagcgaaaacggcgagcccccgtggctggcagccggcctagtggacgctgcagcggcggcggtggccgcgccctccccttcgccaaatccggtgggagggcagacggcgggctcctgcggccagcggtagcagcggcggcggaggtagttgtggtgcacctcggcagcggcgacggccgcgaaatccccatgcggcgacgacggcaggggtgaagaagaacactggtggcacgggcgaggtggtggctggcggtttgagttctttggtgtttttctttttgagttcatgagttcttgtcccaaactttttgagttctttatgctttgtaccatgcatatactattttgctgttggttttgatctcggattcaaaggcggtgatgaaggggaatagggctgggttcgacggaggatgacaacgacggtggcatgtggttggtgagttcggctcggattcgagccggctctctttttttttggctcgagcaatgctaaaggtgccggttcctaaagagccataggtgtcagttgctagtattggtgcggaccaattggtcccggatgaaaatccggcacttgtggcccatttggaaccggcacctatgaccattattttagttgtgttagttcaaaaagaaaacatctctatgcaagttagatgtgtgtagtagtgttgacggctgttaagtgccaaaataatgccgtcaataccttcctaaaaccataaatgtgaaacatccaacatagtggtaagatttatttctaacaatttccacgagtgttgatgtatacttgtatgcaggtgatcaaccaccaaagttgggagagaatgagcataaagagtggaaatatattttgctctgatgaactcacatggttttgagctacaatatataaaatgtgcaattatttggagccaaaacatggagcatcatgaagtggggcccacatatcagcatcctgaagaaagatgtgggccaggggagccaaccatggtttggccaaaccccggccgaacccctagctggcccaatccagcccaacttcggtatgacggttgtgctcctcatactatgacggttacgggcgttaataccggtagaaaccgtcatcaagaggacacatggcaagaggagaaggaagatgctctttggattctatgtagaatattattagcatctccactctcccaagcaagctccacactataaatacccctctcctctccctcattcacacacaccaaagcatgagctgaattacaagaggctctattgtactttattgtatattagaatagggagagagtaaggtagaagaagtcagaggaatcccagagttgtcggtaatcctctcttatcttttgtcccggtacgtagtagagcgacatttgggaacagtgggttgacagtgcctggtgtattgcgttaggattaaagttaagctttccctagacattgtttctcattaggaaatcctctctgccctctgcccatattagttttgtgtccttggatgaacctgacgaggaaatagtcacacacgttcccttggattcgatacccttggaatactccgtaggggaagtgctacatcggtatatcagtgcgcttgcgtatcttatctgtgatcgtaagaaataccaacaagcatttctggcgccgttgccggagaacggttgctgtttatctctgaaccttgttcatcctcgtatcctctttatttttctctcttctaccttcacccctactaccccagagaagtatttctgaaaaaaccttctcaaccgatggagccattatctatcttccaattatctactcctcggggtgaattttacgagccacctgcttcatcggagcctattttgacacctggctatgaaattcgtcccaaattcatcagtatagttagggagaaatatttctctggtttaggccaggaaaacccctaccatcatctgcgggaattcgaacagctttgttcgtgcttaagatttgaggcatgaagcaagaaactgttcggtggaaattgtttccattcactcttcatgagagagcgtaacaatgggtggctggtctgtcctctgggatagtccaggcagctacaaagtcagcgaggacctgtgacttgacggctgttttaggcacgaagtggacattgaattggctcagctcgactacccatttggcgatttggccgaccatgtctttattcctgacgacttcgcccaaagggatggaggagacgacggtgaccttatgagcctggaagtagtggcgtagctttcttgatgtcatgactacagtgtagagcagtttttggatctgtgggtatctagtttttgcgtcgtggagggcctcacttacgtagtacacaggacgttgtacttttttccctctctacgatgataactgtactcacgaaataaggcgtggcagcgatgtacaggaataattcttcattgatttgaggaccaacaagtacagggggatttgacaagtagcacttgagcgcgataaatgcgttctcggcttcttggttccacttgaatttgtcttgcttcttgagcagggcaaagaagggttgtcctcgttctcccatttttgcgacgaatcggcttagcgaagccatgcatcctgtcagccgctggatttccttaagccttgtgggcaactttatgttctcgatcgccttgatcttctcaggatttgcctcgattcctcgtcctgaaaccaagaatccgaggagctttcctgacggtactctgaacgtacacttctctgggttgagcttcatctggtatcttcggaggttgtcgaacatttccctgaggtcgtcgattagtgagtcgatgttcttggtcttgacgacgatgtcgtccacgtatgcctcgacgttttgtccaagctgagtgccgagtgctccctggatcccgcgctggtatgtgttgcctgcgcttatcaatccaaagggcatcttggtataacagaatacaccgaaaggcgtgatgaacgctgtcttctcctcgtcctcttttgccatgctgatttggtggtagccggagtaagcgtcaaggaaacttaacaactcgtaaccggccgttgagtccaccaattggtctattcaaggaaaagggaagttgtccttggggcacgccttgttgaggtcggtgaagtcgacacacatcctctagttcccgttggctttgcgtaccattactgggtttgcgagccactctggatggaggacttctcttatgaagccagctttgagaagtttgtcgagttcttctcgtatggcttgtttttgatcgggtccgaatctccgcagtttctgcttaactggcttggcatcaggtcgcaccatcagtttgtgctcaatcacctccctgggtactctcggcatgtctgacggctaccaagcgaacacgtctacattgtcttagaggaaggtgatgagcgcaagttcctatttgtcgtccagcgttgccccgatcttgacggttttgtcagggttggcgctagacaacgggattatcttgatggtgccatctggttttggcgtcttcttgggcttgctcactttgttcgggttctctgttgtggcgggcaggttgggagtatgctcgatcatgtcaaggctccgcttgtcgcactacactgccaacttggcgttcccctggatggtgattgtcccttttggtcctagcatcttcagcacttggtatgcgtagtgcgaggccaccataaacttcgcgactgcagctctcccaatgatggcattgtatgcggtatcgaattccgcgacatcaaaggtgatctgctctgtttggaaatttttggcgtgtccgaatgtaacgggtagtgtgatctttcccaacggtttagacgacgattccggggtaattccgtggaagggctgatctgttggcgtcagcttgcttcgagttattctcatcgtgtctaaagtgctggcgaagagtaggttgaccgaactcccaccgtcgatgagaactcttgccaccttgatattccgaatagtgggttcgaccacgatgggatatctgccaggtgtagtcacgatcttggggtgatccgcttccgagaactcgatcttgtgctgggaccacttcatcttggtggtagtcatctgcgaggtggagcagacttcgcgttccgctttcttgtactccgtcttagaggtgtacgaagtggatcctccaaaaatgtgggagacatgcagatcgtactccggcaaggcagagtcagagttgttggtggcagcttcttctgccgtctcaacgactcgtacttgctttcctctttcgattgctagttgtctcgcgagctcctttttgacgacgtagtagtcctccaaggcgtgtttgcttgtcttgtggattgggcaccatggcttgcgggagtcgtcgccctgggggttggagtgtctggatggttttgcttgctctgtggcaaggacctctcctgaagatttgcgttttccactcttgtgacttctcttcttacttgactctggtgcatctttatcggccaacttcttcttctcatctcccattttgcttttcccctcattgcgcctcaaagcgtcgtctgcgtgagcgcacctatcgatgatctcgaatagttttcggccagatgtgattcagtgtgttgccaactcctgagtagtgtatcgatctcggacgccagacttgaatgctcaaatgacagaagcgtcggtgatctcggggatcgtatttctgcactcattgaggcgccgaatacagccccgcaatgactcgcccgggttctgggttaaagtatgtaggtcgtcctcaatcgtgtggcgcttgtatgtcccttggaagttgtcgacgaactgctgccacaaatcttcccacgaagagattgagttcggcgggagatggacgaaccatgaatgagcagaacctttcaacgcggctggcagatagtttgccagggcgttgtagtctgcgccagcggcttagagaattgtggggtagacttgcaaaaattcttctgggtttgtacttccatcatatttctcaattgatcccggtcggaacttgtcgggccacctcacattgtgaagtgcgggtgtgaatgccctgcgtccgttgcctgggacatcatgtggcccatggtcgcggcgtcgtcttggaggccaattcgaagaagatgatgaagatgaggatgaggggtcgcacggatcaggagcccggcttctcgaacggtggtcacgtccgcggtctcgactcggatgagcagattgggagtttcgatctcatcagttgccattgtccctctcctgtctttggtgatgatttttccgatcacggttgttgtcgtcacttcggtcatcacgggttcgtcgatcttgatcctcgttgggggtgttcccgcgaccatcgtcctgttctcgccgcaagggagagcgatgacggtgttgtcggtgtggatcaccgtcttcatggcgagaaggagaacaatggtggtgacgctcgttctcgttgcgttccctcctattacgccgatgtccgtttagatgctcgcggaggtcgccatcttcacggcgtggtggtgtagggtcacgtcttggaggagagcggttgccggtggcatgtctcccatcgagattttcttcctccgcatccccggtgggccgttcttcgttcatgttcggctctggaccgcctgcggcttcagcgaacgtggtattgaggttggtcacagtttcccgtagtcactttgcccatcggctggcatctgggtttgtcaccagatacaaaggactttccctcaaaatcgcatctacgttgcgcaattgatgagctagcgttctcgctgctacgaacatgcttgtttcagtgttgtcgaccacgttcacttctctaggtgactgcaaagaggactcgtagccttctaagaggtgtaacacggatggctcattcgcgccgatgaatcccacaaaccgatctggggccgcaactggttccttggcaacgcatggggtttgaactcgtggttgctgaacgcgatgatgcgccggtttaagggttctgaggaagatcctgcagttggtgagatcatacactttggatctatggatcggaaagtaggtggtactcgttggtgaagtgcattgtatccctcgttcccaacaggcgtagagttcagcttgcacatggaatatcaccgggcagtcctcaagagcatgcttggttgtcttatgcacaggacaccaagttctcggtcttagggtggtcgtccttgtcggctttgatctttcacatggagaatgaaattcagctgcttgaggatacctcccaggtgttggggccgtcgatgttccgttctccaccggagtgggaggaattatcggcggggcgtcgtttctctcagtcgttgccgtacccttctcgctcccgatgacgatcggaccagtcgagattgttgtaacgatatagaccggaaagacaatagatccgacttgagtccacaccagcggtgtcgaggtagaaactccttgattggcgctggtgatgagactgttgtcggggagtcctgaagtcatactagcatatccataagcgccaagtgcccctacctggcgcgccactgtcgacgagtggtactcgcggaccgaaagaatagggtattggcgtacgttggaacagggatctatgtagtacgacattaaaacagacaaaagactaggattatactggttcaggccccttatcaggtaataggcccagtccaatttatatgggattgatgatgatgaggacagattaccaagacagtaaccgaagcaagcgatactgataagatcgtagtcgagggattcgacgagatctcccggcgagttgactccgtggacttcggttccgtaaactttggtgggtgtgttggcgatgaaatgcgatgatctttgcctctccccaggggtcccttttataccgtggaataccttgaccctcaagtaagtcttggagatatgtaaacctacacgatatactagagatttcaccctttccgaggacttatgcaattccttaacttcgtggagttattttccataatctgaggtgaattcctaacggcgtatatgggaaccaaccttatatgcgaaggtataccttatcggtatattccataagtcgtaggatagagggtatgctttatccgtaaccctgacacacatctaccgtcgggtatgtaaacggtgaccgggagaaattgcgagacaggttatgcctcgcattcttccctataacccgtattactactcttcgtgtagaaattctgagtttccagcagataaataaagaatcgattgatgcagcctggtccaaattcactaatttagttcagtctggcccaaccctatctatagccgattacgtgctattgcaacattttcaaatgggtttagatagggagtctgcattctaccttgacataagtgctggagggtcattcatgcacaaaactcccgccgaaggcaaggaaattctcaatcgcatattagaaaatacctcctttgtcgggcagtatgttgaaccccatcaagaagcatgtgtcaagaagggaggaaccttcttttgccgagcctaaacccgagccttcaacatcttcaggtctgactaaagagtcctccctggagccatcgccggattccaatgaaattcaagctccgggttacgctcctaaattcagggatgatcctcataccgattatgagaaaaccttgacaggcatcctccctgataacacgccgatagaggaagtaatgttagttctgcttcatgaatcccctgaatcaattctacaacaggatgatcttcatttcattcaaaaagattctggtgagacccttgaattgctctccatagaaccaccatcacaacctcctatcgagcctaaaccttgtccctctggccttcaaaacgtcgttcttgataatcatcaagtatcaacctcattcttgaatgacgtctctcttgagaaggagaacattcaggccagggacaagtttgagacatcaactctggaggatgagaactccacaaatgagcatgaaagcttctatttcaaaatcaaccaggattcatgctcacataaggaatctctagagtcttgtctgatcagtgccgcttcttcgtgcgaggaccacaaccaccttatggtcctcatttctaacatgattagaagtgtggttgtggatgctttcatttatcagaaatattgcaaatctcgtatgtgtttgtggcactaatcttgcagcgagatgtctccatggtcgagcctgtgaccaaaaacaaagcactgtcgggagataccccagattatcttggtaagttttctttccaataaaagcaagaaccagtttttaggataatatgcaccttcgggtattcttggtcaataaccatttcagattgagattaagaacgagggacgtatgatgcctaagaatatgggagctacatcaactgttcattttggtgatccttggtgctgaaacacactttatgaagactccaacaacacacatttggttttgatgtctcgtgacacaaaagtccaagtgtgagggaggccgacgagcttgcatgacgagttccatcaaccaaggccattttggtttgcagtcgatgttagtcttaccttgctgaaaaaaagagaaaaaaaagaagaaaaaagagagaaaagtaaagaaaagagtgacggaagaaaaaaaataaaagatgggagaagaggaagagagcaagagagctggcgggctgcatctagatcaaagaccgcattatgtgcgagtctttaaaatatggtcatacacctcattagtagcaatcatgctgcctggctacaaccagcccctctcttgagctcatgtgcagccttggcttagccttcatccactcctagctgtgcacaacctctcgctccagcagcgcctacacgcatacacgcaagaggagatgccctcttcttttctaggtgtttgatgctacactccagttggcacttgcatatttgcccaaaaagagatgcatcctatgtctctacagcattgtgccaaaaccactcgcttgagttggtgtggtcaaagtgccttcctccgccacaacccacatcaagacggaggagagatcgacaatcacatgtgaccatgccaccgctctagaagtttcaacatatacattatgctggcagtaagtacactcaggtatacaacaaaagattcaccatttcttttacttgtacttatctctagttgagtctggcttgatcgtacatggttatgcgtcctcgggtccattttcatatgctatggtttgggtggtcgtcgacattcataggctttttaaattaagcatgatgcttaggatagatagcctgctttaatcaaagttaacatggtgtcaagtttgcttcaatgaaccatagagccagtactttcatggacttcggatgtatacccttcgtggattaaaccttgcaggaaatcatttcaatttaacggatgagttctcaagcacgagtcacactggaggtaagttaagggccaggaacaaatcaattgccaaaacaggcaaaggagaaacatatcacctctcaaggtgcacggtatgtatattgccaaatgctgctttgctatgttatgtaactttatctcaaccttgtatgagttttgcttaaataaaagtttcgtgaacaaaataaaaattgtttttaagaataaaagaaatgtctctcgaaaaaaaagagaaaaaaacatttttttctctcgagtaaaaagaaaaaaaaatgaaaaaaataaatggcaaatttatgggatccatgctcattaagttttcaatttaattcctttttaccatggatgtgatcaactaatcttgaggctacgataaaatcttttcaattttttgtagtccctcaggtatttgttgtccactaaccttttgcaggaaatatgtacaataacctcaacattcgtaccacgctccttggactatgagaagacagatgctcagggaaccaggcagaacaaatgcaaagttgtgttgcattcttgcatccgaatcaaagcttggtaagtcctatctagtaagaattcgaaacaccctgtgtatcattgcgtcacaaatgtccaccctgctaggttacccatcacctctattgctgccataaaaaatgataaaaaaataaaaacaaaataaaacatgaaaaaaataaaagaaattttaggcacttcatgcgcctagaattacttgaataaaatttggctcaccggtattctaccccgatgaaagcccattttgctttccatctttttgttgaataaagacaaggtacaaaacaagtgtgggggagtcttttcggaactcccaacgcacaatagaatcaattcaacatgacaacatgatgaacactggccaatgactgcgcacaaaattcagtagccagaaccgagtcctggctgggtcggttgaaccaagtgttcgcccaacccttgcctggctcggtactgtcatccttcgccgtatggtcaggtttgcgtgtctccttccttatcctcccttgtttgtgaattaaactttggtagaaaaatcgaatataatttagtttgactccaaatgaaatattgaaaacattaactctcaacgaatagaattgccctatgaatgatcatgtatactttttattctttgctaacacttgtcacttgtgaacaaccatctatcataggaaaccttgctcatctatgtaattaatatttgtgatatggttatgacgaaagaaattattgtccaactgtcatgatacttgggattttgttttgtgaaaaataaaactttttcgagcaatactcctcagtgactatattattaccttccaatgccatatatgattatcattgcaaaaaccttgtatatgtataggctgcttgacattacattgagccttgtcaaattattgtgacccgtgtgagatacttttcatactttcatgatcaagatcgcacgcacactccacatacacacactatgctaaacttttacactagaagctagcatttctcatccattatttattttatccattatccacaaaataaatactccatgtcatttatgcttcttcctccaaaattctttcaaagaaaaaaaacagagatagagagaggcatggctatgcaaaagaagaaaaaaaaaagtcttgctcatacaagtatggagcattgatgaaaagagagagaaaatagaaaaaaaaatcttgttcatacaaagtatggggcatgatgaaaaaaaagaagaaaagatatagccatgcagtctcaaatttccaaagagagaaaattggaggaggaggtatatcaaaggagttgtcttctattttcctttttccacccataaaacaaccatacacatacatacccatacacatatcacacacatgcacattcttgatcagagagtatgacttgctatctcctagggtccgatattttggctttgcaatatatgtgatgcaggtatgccccgattgatccctaccgacctccacctatatagccttttagaatagggacaattcggcaaacatgccttggtgaggatccacaaataaaaccacatgagtgatctgagagaaggtcatttgaggagtatagctactttgcaaaaatatataaaaaccccaagagattgacaggaggattaaggaggacttgagtcatgaccgttctattcatcaattgcccaagatgataagttagacacttgaaaagttcacaggtacaggtatagcttagagtaatttgtgtacttgtattatatcttgggaaaatttattccacattaatccttaacctttactcgggacgagtaaagagccaagtttggggggttttgttgacggctcttaagtgccaaaataacgtcgtcaatacctacataaaaccataaatgtgaaacatccaacatagtggtaggatttatttctaacaatttccactagtgttggtgtatatttctatgcaggtgatcaatcaccaaagttgggagagaatgagcataaagaatggaaatacattatgccctgataaactcacatggttttgagctacaatatataaaatgtgcatcatgaagtggggcccacatgtcagcatcctgaagaaagatgtgggccaggggagccaaccaaggttcggccaaaccccggccgaacccctagctggcccaatctagcccatcttcggtatgacggttgtgctcctcaaactatgacggttacgggcgttaataccggtagaaaccgtcatcaagaggacacatggcaagaggagaaggaagatgctctttggattctatggagaatattcctagcatctccactctcccaagcaagctccacactataaatacccctctcctctcccttattcacacacaccaaagcatgagctgaattacaagaggctctattgtactttattatatattagaatagggagagagtaaggtagaagaagtcggaggaatcccggaattgtcggtaatcctctcttatctcttgtactttgtttattactctgctttaatagaaatatcattctgagtaattgagatttgcgtagtgataattacttcttggttagttcctaattagcatacgggatcattgttcactatagtccatttatttatagtgattgctttagtgtttgatcggaactagagtagttattaattgcgtagacgccgtgtctgggtaattaatcttcagtggttgctgcgtatcgcacagtacgtttgaggtgggtgtagaggtggaaacagcgggttgacagtgcctggtgtattacgttaggattaaagttaagctttccctagacactgtttctcattaggaaatcctctctgccctctgcccacattagctttgtgtccttggatgaacgtgacgaggatatagacatacacgttcccttggattcgatacccttggaatactctgtaggggaagtgatacatcggtatatccgtgcgcttgcggatcttatctgtgatcataagaaataccaacaagtagttgagatggtaacgtgcgtgagggttgaggtcagagatctttagtttaaatcccacatcgctgacattttttcgacatcttaaggattggggtacccatccttaaaagaaaacaactgaagccctagcctactctaggctcctatggattgctaaacatgtccatttagaatagcagaactcgatgataccgacgagaccatagtcgagttggttcgactagatctcccggcgacttggctcctgcgtgctctagctccgtaggctgtggtggatgtgttagctttatgttgatctattgtaccgtctcgtgtcccctctcctcctagggggccttgtatttatacacataggtgtccccttgtccaagtagaactagggaaacctatatggatacaatccgagtagtccttgttatttccatgtagaactctgttcatccttccttatgcggaactcctcctatatccaaaggttgtttccgtataagagatggtatgtggtgggtcctgccgagatttagtaaactactattaggtatgtggtatccataaccctgacaatagcccccgacttcaataaaaatgaacaaatttatattctcaaccgcagaccttggagtaactattatcgagctcacgtgagcattctcggtgagttcagagataatgttagacttcccttatcagcctcgtgcgggcacctgtagggtttgtctgagtcaatctccgacgtcaaccaagaaagtacaaagcatacgactaagtctgtcgtgttgctgtaatcgagaatttggattgaagtcaagaaattttatctcagcgggtacaccatctcttcatttcgtattccttgtcaagatccaccaaccgttctcgaatgatcgagaaggcgcagagtctacgacggagccttgtcaacatttttcgtactcgccttagtcgatcttggtatagaaccatagagacatggagtcttcaacaatgtcgaatagaattttcctgaaatcaacactcaaaaaagaatattagatagaaatagcccctgagcgaatgctcaaagggtgacatgttataatatgtatggaaaactggaaatgaattaaatttacagaccaatgttttgtgtacaagtgtcttctcttttaccgacttcgatcagtcagtttgttgagtcatacactctacctagcccccagccttgtcgtcggagaatcgttctcggaggataaggctcttggaccctcgacctgccttggttgaaaaagcactgatcctagcccccagccatgaagttggaaaactcaatttctgattacacggcttggttaatacgcactgcgagaaatcttacatgaccagatcttacatggtcgtttgtctttacatgatccgataaggccttatccgctctaggcattgctagccgaagttcccttaggttcctcagagaccttgtcggaacggcgtaaagggacatgaggataggtttcaactctaggtgtcgtcatggtaagggatttctgggtaaaacgcttggcgatactgtgtacctgatatcaactttgttggagtaaaggtagcgggagaatcgctacaccgctggtcggggaccaggggtagtcataactcgaccacttgaagtggatgcagtgggagaaacgctacgccgctggtcgagaaccaggggtagtcataactcgaccactagaagtaaaggtagtgggagaatcgctacaccgctggtcgaaaactaggtgtagccttaactcgaccaccagaagtagaggtgggagagatcgctacagcctactggtccgagaaccaggagtagcctcaactctctgccgattgatgtcgaggtacgagagatcgctacggcctacttgtccgagaaccaggagtagccttatctctggaccggttgaagtcgtggtgcaaggaccactacgctgctggtcgaagacaagtcgtagtcgtacctcgaccatctgaagtcgtggtgcgagagattgctacgatttattggttcgggaaccaatgagtagaattatctctcgagcaccaatggaagttgcggtgcgggagatttctacgatttactggttcgggaaccagcgagtagaatcatctctcgagcaccaatggaagttgcggtgcgagagattgctacgatttactctgggggcgctaaagttggtatattacatgtgcatctcatgtggccagcatgactcacatacccaacttatagcatatccagatgtctgttcgcaatcatgtcgggtgatcaagccgacaatgttcacgaggaattatccgttaacaaccttttctcgaatagcccagctatggccggtgctatgagataggtcgtcggtcttcgttggtaggttgggtgcgataactctgcatttgtcgagaacgttctcgataatggagtgtgctcgaccacaacctactcgagtgctcaattgtttctgaaaaatattttctagaaggcaagacatgtagcagataatatcgagtatgtactcaaaaaactgcatggatcttctagtattatcaggatataacgagcaaattaaatatccgggattatgtaaaccgtaaacaagcatgatttatacagaagaaaatagagcgagcccccagcgttagactgtagttggcctaacatcggtaatactcgcacaatagatattgtataaaaaacatgctctaggtaaaaataaattattgatctgacaatgttgtatgatctaaataagtacgataaattgcatataaaatgcgtacctttgtagatatatgtcggatgtatctacaaaattagtagatcaatttgaaaaaccaatctaccaattaccttattgcgtactcgttcgacatcatatgatctgacatcttttggtacgccgcgtatcttgaggcttggatgatctcgatagaccgagttgtcgatgacgatgatggttccgatcttatcggggcacgtactctggtttggtttgacttctcagatctaaagtagttgaagtatccctcgtcaaaaaatccatagtgacgatgtcttggcgaagcttgacgaatatcccgatccgcctgagaacgtacttcgttcgggtcatatcatccagcataagaagtcgttgagtagtttgttgaggaatccatctcttgaacctatctcgtcaaaatcctgaagcaccaaaatccccctacctggcgcgccactgtcgacgtttgatgtcacgattccggtatttgcatagtatggggatcgttggtactaggatatacgcgagattgtagtaaaagagatggggacgaggatttttatacaggttcgggcccctgaattgtcaggtaataaccctacatcctattgatatgggattatatgatggaaaccacagattacaaagggaatagcagaactcgatgataccgacgagaccgtagtcgagttggtttgaccagatctcccggcgacttggcccctgcgtgctccggctccataggctgtggtggatgtgttggcttgtatattgatctattattccgtctcgtgtcccctctcctcatagggggccttgtatttatacccataggtgaccccttatccaagtagaactagggaaacctatatggatacaatccgagtagtccttattgtttccatgtagaattctattcatccttccttatgcggaactcctcctatatccgaaggttgtttccgtataagacatggtatgtggtgggtcctgagatttaatcaactactattaggtatgtggtaaccataaccctgacaacatccaacgaccagatcgaccccacgatccccacgccctatttcctgccgtatccaccctcacgatcccggccctacgccctcaccacttcccgcattgcccccaccaatgcgctccttccctcccccgcgatcccggccggctcctccaacacgcggccgctgccaccagatcagcggaaatccgcccgcgcccccaccctcagcacccattcctcccgctgtgccgtccgttgtcgccgtcgtccagcgccacggccgccggaccggcaagaatccacgcacgccctcacccccagcgccccatccctcccgccatgcatagggccttcatcctgcgtcaccgccgctgccggatcgacgggaatccgccgtgcccccaccaccagcaccccatccctctcgccgttgctccgtatcgcctcaccgtgcccttcgtcgtccaggaccgtcacccacgacaccggcgacgaatcaccgccatcttacacttccattgcaccgccgccgtcgtcgtcgtccaacacagcgattcgccctccgtcctccacgcccaccgcgcccttgcggccattcacgatggtcctggaagaatgccattgcagcgcccaagcttagcctccgtcatcgatgatgcaggtctgcagcactacgtcaatatacctacgtccatgtcccgcgcggctcatcgctgccaaccccgccgacgaggtaactagatttaaagctcattgctttggttcgatggattgacggccgggcaacatggatcttagttcttcgtaccgaaggttccagcagaatgttgttgatcgtgatctttgttaacacagaaccccagttactactactttcgttacagagatataccttttgctttggctccagcatacaaaaaaaaagggaaattaacatttgctatgaagtatataaattgaacttgtaggaaccagtcctgagggtcaacaattatgacagcattaatagaggatgctgctgcaatgtcatttgtaattgcccatggacttttggtaggtcagcctagccagccattcgggtccctacaaagagagttaaggtttggtattcaatcaagctgtgaatatggtggtgtttggttccaggattaagctttagtccatgtcatatcggatgtttggacactaatttagagtattaaacatagactacttacaaaactaattgcataaatgagagctaattcgtgagacaaattttttaaccctaattaatccataatgagcacatgtttactgtagcatcacataagatgatgatggattaattaggctcaatagattcatcttgcaaattagtccagggttatcaaataggttttgccattagtctatatttaatacttctaattagtgtcccaatatccgatgtgacagggactaaaaaaatccctggatctaaagagggtctatgttttttttctactagaaaaaaataccatttcgttgcaatgggtgaaggctattttaatcttattattgttatatggtttatttaagataaaattcactgttaaattcgcttggatacatagtttgttagaaaatcataagctgcaattaggaatccgatcgtctcagagttagcatgcgagttttctaaagagatttcctatacaatttcttttctatttccaaaagggaacaaacttaaaaaccaactcaaatacattatagttccaaaagcgaacgaatttaaaaaccgactcatacacaaatgacgtatcaaagtaccggtaaaaacatcttaaattttttataatagtagagatcatggtccagcctgagttagagttcttgacttgagacaagggtacagcaataactgaccaactgaatatcctaactgacagtccgatagtaattcttccagtaccaatattgccctgtttaggatgccaaaattcagaattagaaagaattatactacttcaagcagcttcaaagtaaattccatactattattactaccactgtaattattccatactgtcataactaccactataattagtgcaattatacgcataattgtctcataatgaactatttggttttgtcgcagtgcactttaatttgtgctgttcaatgctcgatttgggttgctgttaattgctgtggagtggagctgtatgggaattgctcaattctaaacacacttagttatagggctaaaaaaacaagaatttcaggggaaatcatccatattgaagtttagttagatttgccaacttattaacactcaatccctagggggatcaaaggaaatgttgtgactgactaaaatgttggtcggccatcaagagacacaaactatttggttttactttgttaggatgatttcctatttgcaagaaccatgcgagtacttttctttgtttttcctgtacggaattaaggatttctacgaacatgataaaatatcatctcttttggattgtgatttattttaattgtgagaattaacaaatagtgtatgtcttagtctgaatttatacctgagactgtcaaaaacagttgcaagggtatgccatatgtagttgttaatatctatggatcaatccatgtgggtagccaattgtacgacatatagccatgtacaggtaagcctggtacatttgtcaattgataaatatatgaatatgtatcagatacaaattattgttatttttttcctccaatccattcttaactatctaaaccactaatttacatataagcacgaaacagaaagtaagcaagtatcttaacacattttcagcatatttgaaattgataatatgctagactgattactatctgtaaataatgctatactttctaataaaaaggtttaataaccatgccgcttctttcatttctgtagctactatatcatgatgaagcaagttgggtatgtcaatgaaagccaattagaccaagagcagcagatctctgctttataagggagatgactaatcaggttacccttaattccaaagtagtttttgcaatgaggatagtattggattttttaaaatggtaccgctgagtgtgagatgatcagtacagttgtcaagaatacaccgctatcatttagccttcagcttatcagcataagcgataatttgaattttaaaacttaatttagagttgatttttaatcgctaacaagttgtttcacatataataagtttgagcaaaacgatgaagcctataaatgtcattttcaaaaatgagatgtgttgtttgaggggcagcttaccaatgttctagcggaaccagttgaaggtattttagattcacccaatgaagaaacatgcaaaggttctttaatgtcagacaaaaccagctattcagatctttagtgtaatatctcatcttttgagctcaatggacaaactcaataataacttcttttgtaagctagagcatcatggttgaagtgttgttgaatcgaaggcaaaagaggaagctccaagtttcttgatttagatggacaagtgaggtgcacattaaatccaacttccaacttgatgaacaatacaggtcctcgacactattctacttgatgccaagagtgtggacatgaaaggacatataaagtcattgctaaagctactttttttagagagtcttggcagttagttttaatgaaaataggtgggtttttaaataaaaacaatataaatttgaatttttgtgtttcatgtgtccttaaaacggtctttgtgaagtttgttatcatttggactcatttggagagaactatccacaatggagaaaatcataagcagattgtttcttgctattattctgagtttttgaggtgtcgaatgacattttgacccatcgttttatactagcaaatgaataattgaattgtttcaattctgttttgtttgccaagtttgattttatatgtcaacgatccagtaagaaatctagcagcgtaaacatccctatatgttctctacttgctaatttggggtgagaccaataattttagttacatgatagtgattttgctacatctaccaacatgtaatatcttgttcctacttgatagaatttatgactgaagacaaatttttgtttgatgagatggtcaaattcaaaattggtattttcacttgaatgattttagcaacacgtcaactttgttagctttaaaatgcttttatacccgttgcaatgcacggtcactaaactgtaggatcgaaacacaagaactaagccaaccagaggggggtgaatggttggtgtacccaaaaaccaaaatttttagcggaaataaaagttaccctcaatttcgatgtagatcggtctgaccggagtagtcccgtcggtctgaccgtgccagtgccgccggtctgaccgatgtagattgcccggtccgaccgccccaaagtcgccttagcctcctgatgccgccatcggtctcaccgccgtatgcccgccggtctaactggaccgatgccgtcggtctgaccagtggtaactcgccggttggaccgccgcacccgagaaaaaacaaatcgaagaactctcaaagtagatgacaactttatttcttctctctgtgtttacaaagtgcaccaatagcactccttacaaaaatcttgacaaaactcaaaaccctaactaaacaatcaactcaattgctctcaaagcgatactgggaagcctcacgctccctctctatttatacatgaggtaggcagcctaaagccacgaaccaaactcatactagaagtcctaatccccataggaaacctcctagtacaagaaacaaactttaaataaccaatcataccaaatttggactccttccaaattcgactccgcatcccatacgcacacaatacctccgtcgtatgccatatggaatcttcaccaaccacgtgcatcaactctaacctaagtatcctgcatgatatctgaccaccacggacatcgtctttccaccaagctgactcccgatccatcaccgcaaatactctcccgaggcatcgagtcacctacatatgcaataaataaagaaaccatattccgataccaagctatccccaacttgactcattgttagcaaacaacagtatcatatatgtatagtatccatctagaagccataaacatgaaacaatcacagatatccaaagaaacaacccgaaaccaaaaccgacacagcgtcggccggtcagaccgcgggctggccggtctgaccattcacatagcgccggtctgaccggcagcacctgcccggtttgaccggacccgacaaaacagcaaccctgttcattacgtgaaaatcaatcatcttcaaaaccacttcgacaataatctccaaatatcaaaaccaataatcacagatgccaattgttcatcacataataagaatcaaaacacacgttcatcttacaatctcccccttgatgaacacattggcaaacccatcaaaaacattttgttgtttggaaaaataaaaacaaaagtggtaaaaagctggtaaaaagcacactttgtacaaatgtacacatcgtgctcaaaaatccaaaagaaaacttctctcactttcccgtgaatcaaaaaacatgctgttctcaaaaactcttctcttctctcccttttgacaatgatttcatcaagcataggaattatgtttattaatctttaagagcttagcatacatatagcatatcaagtcatgtgttgcaataaaaagaagatgaacccatctataatataacaagcatgcattaaagtataatcatgaaccgaagattttacaattaagtttgaatcaacaatcaaaattcatgatttcatacgatttataatgcaacatctttacaagcacataggttgaagaataaacactaaacatatatacctattgcatttatcactctttctcaaattagctttagcacaaaacaaccaagagaattttttaactttttcttttcttgagcctttttgcttatttttttctcaattattccgggtacgtccctatcgtcaagactgtttccagggattcggcacccattatttttgctcacatcgaatacgtccttgtcgtgaagactgtttccaaggattcggtattcatttttttcatttttattctctatgcacaatgagcaattacaaagctatttgaggaataataattcaataaagcatttatagatcaaaccatatgctagcatcaatattgcatatttgcttaattcaagtagaatgtaagtgtcatgcatcatctcccttaaaagcaatatctaaacctcataaaaagactagaatacatacaagctatgctagagacaaataaaccttcatagtattgctagcatgcacaagaaaataccatatgtatggaacaaagctcttttttttttaatttttctcattgtcatatttttgcttgataaaaccatgaggtacgaaaaactccccctcaaacaatgccaaaaggattcacgaaaaaaaacacaaactcccccctcaaattaacctctaattctccccgaagaaaaatcaagaagaaatcaaagattttgaaaaagacatccaattgccaatgaaaccaccaagattcttatgaattgatattcaaccactcgtataaaccaaaaccactacctcaaacactagcacttgaaaagctaataaacgaggaagtaaaaccaaagttatatcaatcaaaagtaaattgatgttaccttgaaagcaatcgtcatctcaacattgaacgctcatggggagtatgccatcaaaatacctatgaacaaaaagatgtcgaggcctccgtgttggggttagaaatgtaactaccccaggtaaccacgtacctagaatgccacaccaaaatacactcaaaaactaagtcctaaaattattagaaatttcggcaaaatctcccctaaaaatacggacatcacgacaggcagttataagaaaggtcaataccgatataagccacacaatccaaaccatcctagctccacaaatcccacgtgaaaaataaggatcagaaccttaaatgacctttacaagttctatgcaaaacttttgctgagcaaaaaatagtctaaaactaatttcaattgtgtgcaataataatgtgtagtccaagggtgctactcccgccccatgccgatcgatgtcattaggtacctaaaaaccaaattaaacacaagagtgagtaaagaatactcagcaaatacaatcttgaactagtaaaacatacgcatgatttatgcattaagaaaccaatatgaagggttggatttactttatttttaaaccaaagaagtcaaaagatagtagttccctcccgggcaggtctgaatatcctcttagcattaccggtaagccgagcaagcgtgatcagcgcttctcaaggatcatgaataaagacccaaattgcactcccatggctacgcatggttcttgaataatgtaaacagaacatccggaataatgaaacatgaataacgtcatgaatttgaatatgggtcgaaacacgaataagtagcataacgtcagagccatacaatcagtaatatcaagcaattgaataataattatgcaagtaaagccaaacaaaacaactcagtttgtccatcacataagtctgtcttgtacttgccttaactccttcgatactccgactcaactcctccaacgttggaacccttcacacctgtggagcaaaactacgcataaaccactatattcaactaacgatggttacaagggatatttactaaaatcgaaacctagaacatataaaccttttaccgatttgtattaaataacctatagctgttccattactgttttatgcgtaactcacaaaccgtctaacggaaactagcaaataatacaacttcagacatctagaaaaaattctctacaactttcatgttgagcacaaaatcagattatgcctctgaaaatcccagattaaggaaaacgaactactgtcctgatttccggacccggtcagcagtattgtttttgctgtttctcctaaaccgtttatcggaatcgagtgaaactagcaccgttggaaagatatcgacaatgactacaaactttatttaggacaactaacctgattcctgatggtttaataccagatttgaaaatacggtttcagcctagcgttcgatataaaataaattcgaaaaaaccggaaacggatcgtcttaaatataaattagaaacaactatagactaaaacggattacctagcagtactaatgtataagaaaaacgaagaatttggaaatattcaccaaattccccaaatttcccttcttctatcaaatttccccttctttccttccttcctgttcttctctgccttctctccctccttcctgttcgttgcaggccaacagcagcagcagcagaaacgaatattggcagcaacagcaagccgtgcatcaccagcaaggaagagatcagatcggcaacagcagggatcggcagcagcagggaaattaacagaaacaacagtagctcaccaacgaccggctgtggacgacgacggctgtggcgaccggcgacggctgcaccagcggcggcgccggcgaagacaggaatagcagcggcagcggcagagcgcacgaggtgcggcggctagggctacagtagcgattctcctgttttttttttcgtttgttttttttgttggttatataaagagactaaataagatctaacggctcacatctatttaatcctcgggacttcgttcggactccgattactataaatttatagtctattttgcactactcggcgagctctacgcatccacggttcccaatcgcctatacgaacaatggtttaaaagttgaacttttgcgcaattgctctaatactccgcgaaatatattaatttaaaactcggggcattacaagaaataagaaattttggaatccaacactgagtcacatgaccagtagaaccagtaggcacatatgcactaataaaatcagaatcagacttacctgaaaacttaccttcatgcttcacaatagtctaacttagattatgcacaaacttgcctcgatgccaatctgaccgccactgtacctgcggtctaaccgggcctggcagccggtctgactgccggttcaactacggtctgatcgcgggccggtctgatcgactggtcagtgtcggtctagctcttctcctcgaaccaaaacccgttttttgccaacgtcatttcgcaaaagcaatttctctttcctttttctttttatgggcaagtctaaatcaaaaaccaaccaaatgtccatcttttccacaaaaagagcaagtgtacttctcacgataagtttgtgaagtagatgattttaaaatcaatggttttgcaatacatgtagcaacaaaagtttttgcatgtacaacatttgattttcaagaagatgcactcaaagtagacatgatgccagcaaatttaaacatagcgttcttaggctcagtttcaatcgaaatttcacctttcccagcagtacccaaaacagcaggagggtgtctagtatgataagcatgctaactttggattgatcaataatcatgttgaggttctttttaccatcagaaaatctttgcaaagaacttttcaagtaagaaacctcttgtttaagaacagcacaatttttgcaagcatccaaaagacctttttgttttctacaagttgagcaagaaaacacctcatcttgtttaacaatttctttcatgtgtttaacacaccctaaagcatctttcaacctcatctcattcaaaatacacttagaaaaattttgagaaatcaaaacatctttgttttgtaaagccctatttgcacatgaagtattaaacaaggaacttgcacaaaaaacaactttgtattttctcaaaacattctttatcaaaatcaactcatcaacaacacgagcatgcaaagcaaatccaagagtaaaagaagactccaattttttagacttttcaatctcagattccaatttcaaccaattaacagaattgacatctcgtaaagcgttaatttcagaaaataaaacttcacaagatttacattcatcatcattagtaaccaaagattttaatctatcaatttcagaatttagaatctcaatagtgtgatccttctcatcaagcatagtagaacatgtttgaagtttcttagcaaatttgtaagcagcatgttctaattgatcataactaagcttttcttcactatcactgtcagattcatgaacaccagaacttgcattacgagcaataaaagctagatcaacaacttgcttacctttgctctcgtcttcatcttctgattcatcaaaagctgctatgagttcttggattaaccactgcatgcaattcttcttcttctccttcgtgttcttcttcttgtccacttcaacctcttttactctactattttcttccttcttgcctctcccaagcttaggacaatgtgaacgaagatgatcaagtgcaccacactcaaaacaacgattaggacctcctctttttctgttcctgacattgttcatagctcgagaaactttgttaatagctcgagaaactttgttagataacaaagccaagtcctcctcctcaaactgttcgagttgctcatcggacatggcattaaataaagcaagtacagaagaagatgatgaagaagcaccaacattcaaagaagtcgaagaagaaaccaaagcactagacctagaatcaactttacgagcaagaatattcatctcatgagttttgagttttgtgtaaagcgaatccaaagtcaaagtagacatatcaacagactcctgaattgatgtaactttcatctaccaaatagacatatcaagaccattcaaaaagtgacgagaaacctcagattgtgaataatttgcatcataagaagaatcaacagatctaagatcactcaaaattttgttaaacctagaaagatagtcatccaaagcttctccaggtttcatctcaaatttaatgtactcctttttgaaaagatcacgacaaagttctttaatattatttgttccttgatgaaagtttttcaaagctttccaaatctcatgagcagtttcaagatgagagacacgatcaaaatccgaacgagaaatcccacttaaaagaatattgcgagctttgcaattttgttcaaattcaagttttaaaacagcagtattaatttgttcaggaatcacataaggattagaaacttttctccaaatatcaagatactcaggttgaatataagattgcatcttactacactaataaggaaaatccgttccatcgaaaacatcaggcttaattgcaaacttaagagccatggcaaaaactcaagatcggtaaagatcaagaagagcaaacgtggctctgataccacttgtaggatcgaaacacaggaactaagccaacctgagggggggggtaaatggttggtgtactcaaaaaccaaaacttttagcggaaataaaagttcccctcaatttcgatgtagatcagtctgaccggagtagtcccgtcggtctgaccgtgcctgtgccgccggtttgaccgatgtagattgcccggtccgaccgccccaaagtctcctcagcctcctgatgccgccgcggtctgaccgccgtatgcccgccagtctgaccggaccgatgccatcggtctgaccagtggtaactcgccggttggaccgccgcacctgagaaaacacaaatcgaaaaactctcaaagtagatgacaactttattacttctctctgtgtttacaaagtgcaccaatagcacttcttacaaaaatcttgactaaactcgaaagcctaactaaactatcaacacaattgttctcaaagcgataccgggaagcctcatgctccctctctatttatacatgagatagacagcctaaagccacgaaccaaactcattctagaagtcctaatccccataggaaacctcctagtgcaagaaacaaattttacataaccaatcataccaaatttggactccttccaaattcgacttcgcatcccatacgcacacaatacctccatcgtatgccatatggaatcttcaccaaccacgtgcatcaactctaacctaagtatcccgcatgatatctgaccaccacggacatcgtcttaccaccaagccgactcccgatccatcactgcaaatactctcccgaggcatcgagtcaactacacatgcaataaacaaagaaaccatatttcgagaccaagctatccccaacttgactcattgttagcaaacaacagtatcatatacgtatagtatccatctagaagccataaacatgaaacaatcacggatatccaaagaaacaacccgaaaccaaaaccgacacagcgtcggccggtcagaccgcgggctggccggtctgaccactcacatagcgccggtctgaccagcaacacctgcccggtctgaccggacccgacaaaacagcaaccctgttcattacctgaaaatcaatcatctccaaaaccacttcgacaataatctccaaatatcaaaaccaataatcacagatgccaattattcatcacagaataagaatcaaaacacacattgatcttacataaactagtacatcaagaatatgcaagatcgtactacctccatcaataaacaacggtatgggcttttgaaagtaacattcgattattcatcttaatcaaaaatataaattatgtaagtattatttattttttgacctttctttattattaaaaatattttaatcattgctaatgttttttcatatttacactttttttgaaaaaagaaaaatgatcaaatgtcgtattcaaaagttttttcatatttacactttttctgaaaaaaaaagagtgtatatcatttaaactataaaggaggcgaccaccaaagcaattctcatacaagtaacactaatgtaaaattcatcgccatgccacaacagaacctaaataatccacatctttaactcaccatgacaccatttttatgaattttggatggaagttccagtatgatttacttgcgtacaaatctcggttcttctttacttgcatgaaaatttctttccgatttatttgttgggtccctacaaatctgcatttagcagttactctccttcctcagcccacaagcacatgccaccaggtctctttcgttgtttatgtcatgcctatgcggatacacatttaagttgacacatgctggtatacagttatgtgacggcacaagcaactagtacattggaatttggttctaattaaggatatttttcaatttgttcataattaatttggacacaagcatgcatcaagcgtgtgcaatataacaatatatccgcctttaaattgagctactgacttttgaatataacatttgatagtttgtcttattaaaaaaatagaagtatcatttattttggtgcgacttgtaacacatctctaaaggtattttaatgatgacttacattttgcatatttacattaacgttttgaaaaaaaaatacaaagggtccaacaccatattcaaaagttaatagccatgtactctagtttatattggttgaactaaagaggccccaccgaagttattttccaatacatgtaatactaatgcagaattcatcaccatggcacaacagaatctaaatgatccgcgtggttaactcatgacgatgccatcggtcttatttttacgcttatcttatacttatacttatcagctaaaatttaagttttcagcattaaatttggagttgatttttgttttttttcatcgaagtttatttatcagcctttgtttttagatcgctaagaacacatatataaaagttttatcacaaattatttttcatttgcaaatatgggccgcatttttacgaattttgggtgtaaaccaaggtttgaaaggcctgtacttatttagttgactgattgacaaaacaacaaaaaaatatcttaggaagaagtctatatttgttctatcaactctgcaagttgtttaattttttgtctccaattccagtaacgcacagaattcgtccctgaagtatcaacaccatacaaaggaaaaagtacgaattacctccgaactatccgcggtcgtctgaattacccccctaaaccacaaaaccggatattcttcacctccaactatgcaaaccggacgaattacccccctcgacctaatccgcggtgattttggtctacgtggcgtacacgttgcagtccagtcagcattttatttttttaaatggtgggacccacatatcataccccctctatctctcttcctctatctctcttcctaatctctctcagtctctctcgtggcggaggatgcacggcggcgcgcggcgtgagacgaggagggggaatcggacggcggcgtccaggacagccgggggaagcggcggcggcatccagggcgggctggggcagcggcggcggcggcgacggtggcgtccagggcgggctggggaagtggcggtgtccagggcgggcagggaagcggcagcgatgacggtgtcctccaggttgaacggggacagcggcaccctccagggcgggtgggggaagtgacggcggcgacggcgccctctagggcaggcaggggaaccgacagcggcgggagcggcgacgggagcggcgggcctcgccttgcctcgccgcccccaccactcgcctcctacgccgcctcgccgccgccgcctcgcctcgctcgagcagcgcgagccctcgcctcgcctctgtcgccgccgccgcctcatcccccgctgctcgcctcctccgccgccaccgcctcgcctcgccgccgctcgccgccccccccgcttgccgttgtgggcgtgatttgtgagacaaagtgagagaagagagagagaggaagagtgagagaagagaagagagaggaaaagtgcaataggagtacgacaggtggggcccacctattttttaataaataaattgctgactggactgccacgtgtacgccacgtagaccaaaaccactatggattgggtcgagggaggtaattcgtccagtttgcatagttgggggtgaagaatgtccggttttttggtttaagggtataattcggacgaccgcgatagttcgggagggtaattcgtactttttccccatacaaataatgtccctggctaagtacgtacatcaaggttttgtcctgaatggcatcctattgtgctgaatacataggaaacaagttacaaaaataagaaagtaattggacctgttagataacagattatccatctaggtaaatttattatttttcatccccttcctcgccattcgttttgtattaaaaagaaagaggaaaaaaactaatagaaaatattgccatttctcttaagaaatgactacggaatgggaatccaaatatcctttggtttctgtccaagcttagacagaggtctatcagaccacacaccattgctactagacactggatcagcagctttttcggggaaccgtgcacagttcaaacttgaacttggctggttccttcgggatgattttcgtgaccgtgttgtggaaatctgaaataagccagttaagggccacaaccctgttcaaagatggaacaataagatgagtgctttgagaagacatcttcaaggttgggcggctcacaccagtggttcttacaaacaagaaaaaaataccgtacaaaatatcattgatgagttagacatcacagccgaggtacgggaattaactgatagtgagagagagcatcttgcttaatctagagatcagttatctagacttcttcgagaaaaagaaatcaaatggtaccaaagggcaaaagttactgacctcctacgaggggacaacaacaccaagtattaccatatggttgccaatggtaagaaaaggaaaaaacgtattttttgcctcgatcaggacgaagggaaattagaaggtaatatagcattgaagtcctatattactaaattctattaaaatctttttgggccacctgaggatacttccatcacactagatgaatatagaattgaggatattctgcaggtaacgaatgaggaaaatgaattcctaacggcacctttctcggaggatgagatccagggagctgtgtttgaaatggaacacaacaaagcccctggtccagatggtttcccggcggagttctaccagaatttttgggaggccatcaaagatgatttgatgaatctatttcgggatttccatgtgggtgatttaccattgtttagtctcaattttgggataattacacttcttccaaaagttcatgaggcaaaccgtatacaacagtacaggccaatatgtcttttgaatgtcagtttcaaaattttcaccaaggtcgcaacaaatagaattaattcgtggcagaccatgtggtgagctcttctcaaacaacctttacgagaggacggaatatcctagagggagttgtcatccttcatgaaactgtacacgaattacatcgtaaaaaactaaatggggaaatttttaaagtagatttcgaaaaagcctatgataaagtcaaatggcctttcctcttacaaactctacatatgaaaggtttctcgcctaagtggatctcttgggttgagtctttcatttctggatgaagcatagcggtaaaggttaatgacgaagttggatatttttttcagacaaagaagggggtacgtcaaggtgatcccttatcacctatattatttaatattatagctgacatgttgactgtacggattaatagagccaaagaggatggtcaaattgcaggagtagtaccacatctaattaatgatggtctctctaccttgcaatatgccgatgatatggttctctttatggatcatgacctagaaaaagctcgtaacatgaagttgttgctttttgtctttgagcaattatcgggtcttaagataaatttccataaaagtgaattatattgctttggtgaagcgaaagattttgaaaacgaatacatggaactctttggttgttccactggtcaatttccatttcggtatttgggtatccctattcattataggagattaagaaatgccgattggaaggaggttgtagaacgctttgaaaagcatctaagcagttggaaaggaaaactcctatctactggaggacggctaacattgattaattcggtgctaagtagcttcccgttgtatatgatgtccttctttgccataccaagagggatacttacaaagcttgactactttcgctccaggttttactggcaaagtgatggtaaaaaaaaaagtattgtcttgctaaatggaacatactgtgccgtcccaaggaacaagggggattaggaattcatgatttggaaattaagaatatggctctacttagtaagtggttattcaagttgctctccacggaaggggtttggcaacagttgatgcgtaataagtatcttggtgataaacctctttctcaagctcaatggaaggcaggggtcacacttttggtctagcctcatgaaggtgaaacgggactttcaccgttttggatcctttataattaaagatggctcccaaattaggttttgggaagacaaatggttgggcaattcaaccttgaaagaacagtatccttgcctttacaacatagttaggcataagcacgctacagttgcacaagtcttcgaaaacaatcctccatctttttcatggcgaagagaccttataggatcaaaactagcggcgtggaataatttattaccgtgcatcactggttttcatttaactcaggagcaagatgagtttcattggaacttaacctcaaatggggagttctcagtgaagtctcattatctagctctaattcacagcattgttcccaacattaataaccatctttggaaattaaagatacccctaaaagttaagatttttctttggtacttgcaccgtggagtggtgttaacgaaggacaatttgataaaaaggaaatggcaaggcaataagaactgttgtttttgttgcaatgacgagagaattagacatcttttcttcgaatgccgttttgccctttctgtttggtccatcatccaagcagcatctggacttcctccaccacattatgtagcgcatatgtttgggagctggcttgatggaattcataataatttgaaatcacatgttctgttaggagcaactgctacttgttggtcgctttggctatgcaggaataatgtggtttttgataaaaaaaaagtcatatcttcacctttgcaggttatatattctcttatccattggcttcgtacatgggctatcctacataagcctggttcgcgggatatggtagttgcggcatgtcaacatttggagaagatggttaaggagttatttacccagggatatgggtggcgatctagtcttagaattggtggtccttaaaactctgtgcttttggaggagatggccaaggagttgttcatgagtggcaatttagttgttagattgattgtacttaatactccatgtcattcttttttcctttcgagtgtggttttgtttgttcagctgtgtgcatattagttatgcagaggccgaaagtgttctcaggataattgtatcaccttgatgtaattgactgagttcaataaaagcttccattatctaaaaagaaaatattgccatgtcttttaccacatcatgcatgcaaacccacatattagttttttttagacgtttagacgttttgatagttgactaatgagttctggcaaatattggagctgagggacgaaaatttaaactatgaggactggagggaccaaatatagacatttcagatcttacatggtagtcagtcattgagatactgtcatgactttgatctaaatttgcactgatactggtgcaacgataagcagctacttctacagaatacttcctccattcctaattgatcttccattcctaattgatcttcatatatggtttatgcatcaataccaagataaacttgcggagcacttaatcagcatcggaaacatgcattagcgtttcgtatccatgaatgtagcgccatcagttttgcatgccgcataacctgaccaatcagatgcatgcagtgttcagtaggaagtatgattaacgtccttcccgggattttcaccgcctcctcaccgtaatgcgacgatcaaaatggaattatcattttttttttttgcatacgacgatcaaaaggtaacggaggtctgctttaagcgttcacaagtcttcagcagtaaactctcgcatgctgcacttgagagatgagagcatatcattgccttgcccactgcttttcactgtcaacataatagacaggggttagcgactggatgacaaaagaaattaactgagaaacatagttagcacttagcacattccagtgcatatacctgtggtggatgttctacttgtgcagttgttactgcaccggtcaaagcagcagcctgctttcttcttcatcatcctgaagctcctgccctattcttcatcatcctgatctgcgcctcgatgtaccattgtaccctctgctcctcctacccacaccacaagtcacagctccaaccaattggcaacaataaaacatactcgtagaacacaacactgaacgaaatcatgtcttgcggacactcacaatctgctcatttgcccttttcctccttcgtcttgacactgcgtaactcgccattttgcagtaagggcaccttacaagtcaaggaataaccaaacaagatcacacatagtacatggcacgcacgcaggatttctaacatcagcaatgaagaatagctctgaagaagaatatataaggtacacccaaaaaaaaaattattctataaaaactcggctaatgatactgcgtcggccggcacgagctcaggcaacattaccaacccaatcctccgcagccgacgaagaagaagcatgtgtagtaagtgattagttatttttgtttttgacttatctagaaggcattctactcccgccgtttctaaatatttgataccgttaactttttagcacatgtttgactgttcgtcttattcaaaaaaacttctgtgaaatatgtaaaactaagtatatttaacaatgaatcaaatgatagaaaaataattaataattatttaaatttttttgaataagatgaacggttaaacatatttaaaaaagtcagcgtcaaatatttagaaacggagggagtactatctaagaagtataacaggcaaacatgtataatctgaaagcttatggcctctgcaaagttcagaacgttaatttgtttgtaggtgattttgatactgaaatgagtatttgttctgaaaatttcttttccacagtttacatctgttcgatgatattctgctatccacttcttcttccttaattaatgtgttccttttctttcaaaaatcacatgcatgtaaatattttgtttgttgctttctccttctctctaatataatggcagaaaaacctacctttggttaaaaaaaggagtcctcaatgaggaaacaattaatagccagggaattggatgaactcaaaagcagacaaaacctttttttaataaagaaatttatttcggcattttctttgaagaaattaactatagtcaactattaccataacgaagtttgtagttcaaactactgcatattaaaaaacgcagtttgatagaaaacaagacaactatatagaacacctgcctaaaaacagatgtgttagtctattgttaaaacttcatttgcagttagcgaaaatctacataatcgacaaagtcaaaaccagtagagaggatacatagtcacccatgttctgaattcaaattcaaagtcacaaatagactcatcaaattccatgaccaatcatccatccgaatacatctcgctcacatcacagctgacgattacaatctaaccaaagcgaaagataagtttagaaccaaatgaactacaatcagagcctacgttttcattagggatggagaactggacactgtcgccaacggagaagaacaaaaccttataagtagaaggaacaaattcattatcaacattctttagaaaactttttaaattatcttttcaactttccaaatacttaatttatttgttcgtgcctccaaataattatcacaaactttagttttatgaaccatccatcattcattgattgaacgcaccgggacttgagattaggattaaactagtcaaaagctcgcgcgttgcagtgaaaatttataaaagtgaagttgtgatgaaattttaggggacgaaaaaattgatagagtggtataacatatttataagacatgtgtgtgaattgaagcaaaatttgcaataatgatgatcaactatgagaaagttgttgaggcatacttagtgagatcagcattagaaagataaaaattgtcatcgatagagcttacctcaatctcgaaagtactcttaaattatgcctcaacaaatatcattttaaatataaaaaacttaccatgtgtcactaattatgtttaaagtacagcctggtagcaggagccatgaaggtagatttcgtgcttaaattgttgagattattgaagagaaagagcgagtgattacttgacggtttatttgagcattaagataagtaccactatttaatcatgcaatgagcaacaatcaacatcatgaatagaggagggattcatttgcagttaatgtgaggaatggagcacatgttattagcttctctattgtatcggatggttaatatctgagatgcacaatatgatctaacggctataacattcttgatgatgtggttttacgaattcacaactaattggagtggttatatagaaatagtagatagttgggatgtactcccttcgtcccaaaaaaaaaaatccactcatagcatgtcaaggtggaattagtggagatgaagagtgactaaaatgcccttaatcattttaggtaaagaatagtgaagggataaaacttctctttttacgtgctgagagtagatagtatgggataaaacttaaactcttaaagttgaatttttttttgatggaggcagtactgattacgatgactccttcctagtgagtagggaactatattatatttatatttatagggtatacatagtatgggttgcgcaagcgtgtgctctaagttaagtgaagtgatctttattaggagatcgaggacccattcccctgccacattctcctcttaatgacttgcatactcaattagtggattagtcgtcgtactactactaattaatttggtttggctgctcacatgacccaatatatatgcatatatatgcatcatggtcccatgtggacagagagtgccatgccacgctacctcacaactacccatcatcatcatcatcgatcatcgtcaccatctcaccattgcatccatgcaaagcatggtcccaaaccaaccaacggtagatagatagcgatgctgcgctgctactgtccaatactgtacagctacgcctagctgtactatatatgaattttctcagtgctttttgcgagtgaaagagagagagagagagatatgagaaattgagaaggaattagcataaactagtacgtactataggagtattatagcatacatataccaacttcggtactttttgtacttgatttctgatcaatgtaattagaaagtcttcggtcatactcttttgggggttcggcaatgggcaagctcaatccctatgaaatgaaatgcaaattcaatctgcagctaatagtgaattatttttagccgtcatgcccttccagtgagtatgcttcgttattacatttttaacaatcaactatgaaaaccatttttcgtgacggccattatggatttttgctggcggaatttacagccgccacaaagcaaaggccagtgaaaatcaagatcttcgctagcggttattgaccaccagcaaaaatccattttcgctggcggtcgtcttaagccagccgccagcaaaaattcattttcgatggcggctgtgttatatcggccgccagcgaaaatctatttggggaacaaaaaaaacacgcatgcaactgcccagccgccagcgaagatttggagaaaagacaatagattcattttcaaaattcaaatccaattcatatacatatggctgctcatttccaaattcaaacacaatataaaatcatcattagcacacatgtacacatatcaaacatcacaacatgcacaaaacatctacatcatcaggaaacatgcaaaaaaaaaaaaaaaaaatcgtgccgccgccggtctcttgtcgtcaccacctcatcgctgccagtggggagggaggaggcgccggatctgctccccgccgccccctcccccgcactgctgccaccgccaccccctcccccgcgccgctaccgccgccggatctagcctcccccgtcgtggcagcggcggatccggcctccctcagctgccgctgccgggccccttcgtcgtcgtcaccggcctccctcatcgtcgaggaggcggatccggcctcccccgttgacactgcagccggatccggtctcccccagccaccgccgccgggccccttcgtcgtcgtcgcccgccggccttccctgtcgtcgaggaggcggatccggcctcccccgtcgtcgcggtggccggatccggcttcccctagccgttgctgcgccgccccttcgtcgttgttgcccgccggcctcccccgtcatcgaggaagcagatccggcctcccccgtcgtcgcgacggcccgcgtcggtggatcaagagttcgcggatcgagagacggagaagggagagaggcggatcgagagctcgcggcggcctgcggcggagaggtagaggctgcgcctcgccgctgctcccgaggcggtggagctgcggcaacgggagccggcggtggtggggagagggagaagggggaggagaagggagaagggagggaggagaaggtggaggagaaggataaggacggagaagaataaggataagggcgggcggtggatttattggcctcaatttttttcagcggtcttcactacctgccgccagcgaaaatcacgttttcactggcggacagctaagaggcccacctcaaaaaatagagtttttttttatggcggatctcttagcgtggccgccagcgaaaatcggttttcgctggcggtccatggccccccacccctcgaaatatttttactggcggttttcgcgtatggccaacgccatgaaatatcgtttttctagtcgtgaatgtattataaaaatgataaaaaaaaactaactatggagaagtgttttttaaagataaatttactttagtgatactatttgcacatatcaaatcttgttactttgatatttattgacgatttaagtttttaagatttggctacacttattgtacgacaatgtgatctatttgaaaacagttggaggggatatctttgatttgccctcttcagtttcgtagttcttgatattttgaacaacgacacagtgttctaaacatattttgactatatttttctattataacatataaaaataagtaaatatttaatattatcaaattacttttaagactagcgttttcaaaccaaatattttaaaatctatatatagttaaagttctagttattttatttaatttcaaccttacctaaaatatgaagaattatagaaccagataaagcaacaatatacatactatatacatatagtaatatggtaaggacacaagagcatatgcatatcagcatatatacttgtatacatgcacgcttactttgagatgatcaccacctagcctagcccttttttttccttttttttttgttgcagtgagcgagcaagcatgcaacaaagtgtgcctctcttttggcacataccattattgtgtcttgttggaacagctagcagcatgcctgcctgcctgccttgaccacacacacactgcccggccagctcaaatgcttctgatgaacagagcgagagatcagctttgcaattcttaatcgcccatatgtaagtacgagcaaaagctcacctgaaagcacaccggacactagcaaaaggctgggatacgttgcttagtttttggtttaagataataataataacaacaacgttaataatacacagtagccgatagcgaaagagcgcagctttccgcttggccatttgtgactactccctcactcccaaaacaagcgcaaccatgacttttcctgttcaactttaatcattcatcttatttaattttttattactattagattataaaatgtaataatactttatacgtgacttattttttatttttttaaaaaaaattaaataaaatagacaattaaagttggattagtaaacttatagctgcgcgtattttgggactgagctactaagtgatcgtggtttttttttcactctagctcttgtactatgacagttttactgatgtaccccgggggtattttacgcaggaaaccctagaggttggggggtcgccgccgccgctgggcccacgtgtcagcctcactccccactcccccctacacggtagccacacgggctatttgctcgcacgcctcagtccacctcccctgagctgtgctgctgcgctgcgctctcggactcctcccagatccccaatccccccacgctctccggccatcgcgggtggagcagggccgccgccgagggctgggggggagcgcgagtcccggggatccgagccatctgccggtgggcggcggcggcggcggcggagttggggttcgtcgtcttggtcttgggtcttcttcgtccctcgctgcgggtgggtagcgcagcgtcggggcagatccggctagccactgcgacgctgaattctggagatccccgcacatggagtcgcagcgaggtccgccgccctccctccctctctctctctctctctccttatttagtagtagtatgtatgcctgtgctgtgctgcctcgagaacaaacgttcaccgcgtccccggcggcggcactcagccggagcacgcggctgcggtgtggatcgccctggctttcaggggtgaataagggaacaatttgttgtgaagactagtagcttatagtcaatttattcaattccttggtctatgtgtgttgtttataattcaacataaggaatgctagttttgtaaagtaggattaattcagtgctagggttgccactcaattgaacttcaaggccaataggcacattttagacgctcagagcgcaagaactaagataatgatttagctcaagttattctgtgggagacaaggaaaacatcagtttgtacgattagtttcaaaaatggtgccccaggagacatcgtataagctcttttgagcctaacaagtgttgtgcatttcacattacaaacaagttggccccctttgatttgtaggaaaaacataggaaatttggaggatttcaatcctataggaaaaatatctatgaaggtctttgaaacaaaggatatcttatccttccctttgaaattcctatagagattttgaaggaaagttagcaagagctctaacctcttggaaaatttcctttggagtctatctctctcatccgattcctgcgtttttcctgcgccctaataaattgaccattcttgtatttttttcctgtgttttgcaatcatctgttctgcacttatattcctttcaaaatcctgtgtttttccaaatcctcctttttttcaatcctgtgcttcaaaggagcactttctgtgttacaatcacataacagcacaaacaagaccttgttctttgttatactcaagtgaagatgccatctataatttctatacactacatcttattatcagtatgccaatttttgtgcacttgttgcctctgtttggttaataaatcatctcaacagtagttcttgaatctgttgttaatttgatgaatatatatcaacttgagaaatctattttgtagatacgttgagcatgagtgctcttactttgtccatatacaaatttctatcttctctattatacatttgcttgttggtactttaaagtaaaatacaaaaattgatgtgcacaatgtgttgtacatttaactttctggctcaactgggaagccgtgccctttctttacctgaaatttatttgtttgattgcttctcatttgcatgatgtagcactaaccaatgggacatctaaacttcaatgctgaattgctgatcatatcatttactttctgttacctacttacctgtacttaactaaaaacctaaaatttcttgaagccctattgtccaactgtaacatattttttgacaatttttttaatgacatttggcagggcaatctcctgatcgtggatcagacgcatcaggaccaaaacagtctagtgtttcatcacatggtagacaaaggaattcatcatcttctatctgtaaagattttctccggaagtttgtggacaatgaactattgacatcaagcctagaggactggttctctgggcacagtgaagactgtggtttcaagaagccagcatttgatgttccttttgacctaagtgaactacaaaattttgactatgctatagaaggtgttactttccaacagctagtacggatgccaaatgctcttcatgcctcaacatcagatatttttgaagctactgcacatcttgctttggaagattttcttcatgcaagtattaagggtttgtgggaaactttctggggccctgatgaatcgatgcctttctctgttgcctgtatacacagcacaagctccaaattttatcctgctgagaaggctattagcagtgggagacttgatggcgtttgtgcaacggctgtattgctgaagagtttaaagcattcacaaggaaggtgggatcatattgttgtactggctttgttgagacctgatattggaatgttttcggggcagaatgaccaacagccatctccggctgttttgggggaggcactattctttgccttgcgtgttctactttctcgaagccttagtaggtcttccacagttcttcaaaattcagattgtgtttacgtccttcttgttgattcacagtttggaggagtggtaaatgtccaaggtgatctgaacaagcttgattttgatttgaacaatgtttatgactctgctgcagagtggataaaaaagcatgcacaaatcacagtttcttccatagaccgcgtatggaacaaacttggcaatgctaactggggcgacattgggactcttcaagttctccttgcaattttccattcaatgatccagttctgtggtgcaccaaagtattctcttgatgaactagctacagagcatagttcccgattacagagccgaagatcagaaagacatttggttggcaggcaagctaatacaaatggtttgtttcgattccagcagcaaagtcattctcctgaaattgttgaagtacaagaggagggagctgttaatgtaaaaccaaaggaaattttgaagcttgaggtaggatctgttgtattgatggaggatgctgattggcagaagggttttcaaatcaatgatattcttacagacagcgaacctcctatctatagtgctactcctgtagaagaacctaccaaaacccatctgttgtatgtaggctccagcccttctcatttggagccagcatgggaagatatgaattcttggtatcaagttcaaaggcagaccaaagtacttactttgatgaagcaaagaggcatttcaagtagatatgtcccacagatggttgcttctggacgtgtcgtccatccaggcccttgtaacaagcctaactctagtgggagttgtggccatccatggtgcagtactccaatacttgtcacctcgccagttggtgaaactatttcaaatctgattcgtaatgggctgtttggtgttgaggacgctctgagatgttgtcatgactgtttgtctgcgcttgctgctgcatcatctgcaggaatccgtcatggtgatatccggccagagaatgtgatccgtgtgagcaatggttcaaggcatccatattttgtacttattggatggggccatgctatcttagaagacagggatcggcctctaatgaatttattcttctcatctacatttgctctacaggaaggcaagttatgtgcagcatctgatgcagaaagcttaatttatctgttattcttttgttgtggtggagtttgcccagagcttgactcagttgaaggtgcacttcaatggagggagacatcctggtcaaggagagttatacagcagaagttgggtgatgtctcagcagtgctgaaagcttttgcagactatgttgacagcatttgtggaaccccatatccgatggactatgagatatggttgagaaggttacgaagaaccatcaatgaagatcatggcaaggagattgatacatcaagttagtactgcagctcatgttagtgcggaagtacgatatggaagatcaagaatggtcgttccataccctgtattgttgttgtagataatttattcgcctgtctcgtaaaaggtccataacttagtatccccctccatcttgctccatttcatctaaagggtatttccatagtcacaatctgctgctgatatcctcaacttggatttctgaaaatggtgtcgcctttgcacaagactgcagtagagatcttctgaggatatctgcaacatgatttattttggcgagtgctcctcttaagtctttgcttttcttcgggtctcgagtgtgtggtatagttgatcaatttttggtccttttgcttttttgaaattgttccagaatggatttgtgattagaggtggtgtggcagagtagcattttgttctgactaaattattttgcgggtgctatgttccaagtgcacctagttcttgtaaatgttgttcttgttcagctgtacaaacttcaatcatgctaggctgcaactgctgggtgttgatatgttcgatgaaatgtcaaaaaaaaaaagttgttccccttatgtgctataaggagcaggttttttacctgacgggcatatattgttgtgagaatttcaggccatagataatctggatatgcagacaaattattgtttctttggagattcagttaatggcgtgacgaatagaattcaactgtacgtgtatcctactcccttcatctactttcgatagtcatatttccaaatctaaaaattttatttttttccaaatctaaaaaatttatttttgataggcatatttcaatccaacaacttatcatctcaataactttctcaaatttaatgcatgattcttcattgttccacacatgattggctacatgaacattgagaaatgtaaatattaatgaatcgcttatttacgaggaatgactagtagcatgtttaaatggatgataagtagaattacttatccttgatctatgtgtcaagatgaaatatgactatcaaaagtagatggagggagtatcttatttttgggggcaatttggcttgactagttgggtttcataattatagttctggaagtttgctagctccctccaccttttccaacaatgagcaatagaatcattgttgttaattactccctccattctataatataagtcacaactaccgttctatatattataaggcataactacctttttttttattttagatgttttataatatatggcatacatgtatgcatacaattaattaggacttcttctccattaaattattatttttttaaatcctccatcctcaatatctctaattctattggatgcatacattatatttattagggtgatctaaactagaagatgataataattattttttcatctttgggttaagggtggttgtgctttatactattatatactattatagaacggagggagcaatgatataatagtagcataattttccatggtattgaattccttttgatgttctcgagtacttgaaatacttgtacgcagcgcacatagttcatttcagtgacgttcgcagattttgctgtaaaaaggtacttcaccctgtgcgagcatatgcatatttctgaaaataaaaggcattttcggagtgaatagtcggtaatacactggtggacaaaccctttttaatcccgtttcacaaccctcctatattcccgcttatataactgggactacaaatcaaatcatttttagtcacagttgaaataaccgagactaaaaatgaatatttagtcccggttggagttaccaacatggactatagtccctcttggagttaccaaccgggagtaatgttctttttttcttttttttcctgctgcttgcatgatttcgagccccacaaatcactcatattatccaccaatcattcgaacaccacgcatcattcacaaaatccccaaatacatcaagctgcattttctatccccaaatacatcacaaatcattcacaaaatcacaaaatcatatccacaaaatcattcacacatcacacatcacacatatcagaataagaaatccacatcgctcagatcggccgcacatatcagaaaaagaaatccacatcgcatagatcgaccgcacacatcgcacagatcagaaaaaaaccacatcgcagagatcaggtgccgttcatccgccgccttgccggcctcccgcccggccgcctcgagctccgccgccgcctggggagcgttgccacccgccacccgcctcctcggcggccggtgcccgcccgctgccgcctcgggctccgctgcccgcccgggaagcgccgtcgccacgccggacccgccggcctcgttggccgcctgctcggccgcccgccgccggcctcgcaggctgcctgcccggccgcccgcctcgctggcctcgctggccgcccgccgccggcctcgcaggccgcctgcccggccgctcgccacttcgcggccctccctgccgccgcgcgccgcccggcctcacgtggtaggaggaggaggaggaagagaagagaagagaagggagaggaatgggagaggagaagggatggaggattgggtgaggctgaggatggagaagggataagggaggctgtttaattaatgagaggggaggggagaggaagggggagagaccgaggcggccgcgcgcgggcgcgtggcttggttgattttttggtctcggttggtattaccaaccagagctaaagatcaaaaagtttttaaccgggactattgtggattttgggcgaccgagtaaagatggtttcttcaccagtgttagctcagggaaagatcgtttatgtgagatttttttttgaaataatacgattttaatggaaaatcgcaaaaatataagtcggttaggcgaaattgcaagtttagcaccctatcgaacatccgtggttcgacagggtacctattgaacaaccgcagttcaacagggtacctatcgagagttcgacaggtgataaaataattttataaaagagaaaaaaaacactgtagagcactgtagccgtgctcctatcgaacattgcctgttcgatatgtcctgccgcacacctatcaaagttttcatgttcgatatgtccctgctgggtactgtagcaagtacttttttttttttaccaactaccggtcgaactgcagttgttcgatgggttcccctatcgaaccacggttgttcgacagggtgctaaacttgtgattttgactaaccgacatatatttttgtgagttttcattaaaatcatattattttttaaaaaaattcgtttatgtgaccccgaaagtccgcaagttaatagttcggtagagccttttagcttagcttagctaatcagctgcacggaaaacaagatagatatgcatgattaatcaagtattactatgaatatgaataaaatatttgtttaattttgtgaaaaaaacttttatgtagatactccctccttccaaaaagaagtgaatataggactggatgtgacatatactagtataatgaatctagatagatatatatccagatttattgtactaggatgtatcatatctgttattatgttagttttttatgagacggagggagtagtttgtcacgaaacataacgtttaaccattccaaaaagaatacatactcacgtaaaacgagtagcccagcttgtaagctttcccgagcgcaccctatactaagcgtgggtgttcggtttattcggtttgtttttttaagctatatggaattcagtttcttaaaatgtcaaccgatcgatgcaaagttctaggaaaaaaaaaagaaccgagcaaaataaaatgaagaagttcggttcagtttttctggggcttggtttttaccgaggaagatgttgatcgtacgccgtggtcgacttcgagcgattacgcacgcttagcgcccgcccagctacactcaaggggcccgcttgatcaaggaatggggtttgtgtacgtgttagctctcatatattttaagggccttagtaaaaattgggttacatgcatgttagtgggtcttgtgccagttggattggctacagagtgcacacccatttagaccatgttcggaagataggtaaagctgtaaaagactaggatcctggcttttttcccagcctagaagggaaagcccaccacgaaggggaaaaatccccagactacccaaaagttcattttgcaaggtccgggaaggtaagtttcctggctgaatacccccaaatcctaaggaaattcatccatgatcctacctcgtagaacgaatcccacacgccgccatctcctctatacgatgcgaacgccgccacctcctcttgcagcgaatgctgcctcctctcaccccatccaccggagctgccgcctctagatgcatcagccggcggtgcttcccttcctccctggtgctgtcgccgcctcccttttttccttattgccggtgcccggtgctgcccctcttcctccaccactgccaaggatctcgggtacatgctgctgggcatcaacgcggccttctccaggcctagaaccatggcatcaagtacgccccttcactcctctcgccgccgctactcatgtggaggaagaagtggacaggaagcttatgtttttctggcttctctccttgcaagatctttcgccacttccttctccgtccggccaccggatcttccctaaatccaataaggaccttgagaaactcggcatcttctactatctcatccaggtgtatacatttcaattaattttacgtggatatatattttcctactgttagaacttgtgtggttaagtttgctgcatattgattatcttgattctttcattattcagagcgtatgttagttgatatcttgctaagttaaaatctttaaagtctagttatagaactccaagttgttagttcattgttttcacttgcaatgagatgctattattcataccttttgaatatggttttctgatggcaagcagcgcatgtaattcaaaatgtgaaatttcatccccagtattgctctttggattgtagaataattcagattcagaattatcgtactgttctttactccatgtccaaatactctgctcagaccatgtttcaggctatggctgcacacgcagatgaagcattttgtactaatcactgaccaaaattcctcctaaaatttgcacattggatgaagcttaagattttcgtggcacgcttttcaaactgctaaacggtgcgtttcatgcgaaaactttctatatgaaagttgcagtaaaatatcatattaatctatttttcaagtttataataattaaaacccaatcaatcgtatgtaaataccacatcattttacgtaaaaaacttaatcttcatcttcttctttttcttcttcatctttagaagaaaaaaacaccaatgtagttttgcagcaaatctgacgagttaaagctctgaatcctaaaaaaatccccaaaaaacactctctgtatctgaagagtgaaatatctgaatatgtagatgtaaagtcatatatgcagcagttaagcacgtagaatagcagtctaccagttgccaataaacaatttttttttcatgtaatgattggtgaacttatatcctgatgatgatattttaagttttaccttttttgacatctttgcaaggatcactcttttcctcactacattttttactactatcaatgggaggtattgtctaatgaggaaatcaattttatcttgtatacctctgaaattttagctaatcccttctatacctttgaattttgcttactttcttatatacctctaaaatttggttttgatcccttccatgcccctttcgtcagttgaccatctaatatccataagagtgaaatacatggccggtccttaaacttgttgtgtggtgtcacttaggtccgtgaacttaaaaattgcacgattaggtccgtaaacttggtttaatgtaccaccccagtccaatcgtcctttgactatatttgaccgccaacgtggcataccacgtaggcaacacttttattctcagcccctccacatataccttcgcacataacttaccctgaccagtgcatttcaacccaaatccccccaaatatccctaaatcggctagggttttgatggtgagtttagcggaaggaggccgagaggtagtggttgtggcagcctcggcggtgagattagcggtaggaggcagcgcagtgaaacggggttagcggtggcatagtgcggcgggaggcagcacagtgcagcgggaggtagtgcaatgcggcttgcacgctaggcatccccatggattctccaagctcgtcctcatcttgaagtcgctggaagaaggtgttgttgatcaagtacccgttgcataaggataagattattttggagtgcagagcaatgtcaattgctaatcgggaccacatcttctatacatgcaaggagaagaatgagagggaagaacaatttgagattttttcttgggattttggtgtcgctatatagctacaaggagatatatgtgacatgttgtgatgtggaggggcctaagagcaaaattgttgcctacgtggcatgccacgttggcggtcaaacgcagtcaaatgacatttggactagggtggtacattaaatcaagttcatggatctaaacctgcaattttcaagttcacggacctaagtgacactactacacaagtttagggaccggcaatgtattttactctttcgataaaaatgaccattttaacttttggatgaacacataaatttatgaattacataattgaaaatgtaaaagtttgtcgcatgagactattatagttatgagtttgttgtgcgatacattatttatgacaaaatttatttttatataataaaataaaaatatatatttatttttttaagaaaaaaatcataaaaatgaggagcattcatacaaagataggactaccaatgctcacgatattttctttatgaatgctcccaataaagaaaatctattgccctattaaaatttcaaataaaaattttaatttattacatttttatttatgtcaaaaatttctgcactaattatttagtctcattagtttcataaaatgcacgtactatgcattaaatttctgcactaattatttaatcttattattttaatcattttttaagcttatattcaaacctaaataatcaagggcataaaagacatttgcaaccaaacttaacagtgaaatgaaggaatcaagttgaaatttcagagatatagaagggatcaagaaaattacaggtatatgaaaggaattgagtgagttttaatgcttaggtcttgtgaactctgtgaaggatctgttgcattgtctagtgactagtggcatgtagttagtaaatttgattaaggtgcataagctactatggcactaatgagaattaattatgattcattattggatagtcactaagttattaaataaaattgtagaagaattacccacaatcaaaagttagcactatgccagaaccctacatctgtgacagcataccagtgacgggcctatgaattggtcacagatgactgtcacctttgacgggttgctaggtttgctgtcatcggtggggcatccggccacggcccgtcacaggtatcccctcacctgtgatgggccagaaggaaaagccgtcacaggtgaggaagtgacgggttttcctcccaacccgtcactcgtatcctctcacctgtgacgggccgtggaattatgagccgtcacaggtggtggtccgccacctgtgacggattttttttatggctcgtcacaggtaggtcaatacctttgacgggcaactcaattgaagcccatcaaaggtatgaccaacacctttgatgggcttttttaatctaacccgtttgaggtgtgttgggtctataaataccccacaaactgccaactgctttccatcccgaccagttcaatgttcacaaatcggttgggagggcaagggggggcgaatttttgctaaaattcaaggtaaaaaacacattattctccattcattctcaatatatcgatcatcatatatttttctttgtatgttgttgattttagatggatcgtagatggatgtactatgcgcatcgttcgtctaccgagtatagagagggggtcactgaatttgtcacatttgcggataatgacagaaaatgtaggatgcacatgttgtgtccatgtagggactgtaagaatgaacagatgatcgttgatagcgatgaagtgcatgctcatttgataatgaatggattcatgaagaaatatacctgctgaaccaagcatggagagcaagaggcgcctgatgtcgcagctgaagaagtgttggatcaggatgtagagaacaccgccgcagctcgagaaggcatgttcgtaccttctcctttaggtggagagaccatagatttggacactcaatgtctatctacaatgttgcatgacaatgaagacgcagaggacaacgacagagattttgagaagtttagtaagttagtggaagattgtcagatgcccttgtatgatggatgcaagtcgaagtacagcaagttgtcatgcatgctggaactcatgaagcttaaggctagtaatggctagtcggacaagagttttacagaacttcttgagctgtttaaggacctgttgccagaggggaacaatttaccatagacgacatatgaagcgaagtaagtattatgtccgttgggcctggaggtcagaagaattcatgcatgtccaaacgactgcattttgtattacaaggaatacgctgacttggatgtctgccctgtctgtggggcatcaagatacaaacgagcaaagagtgaaggtgaaggaagtaagtcaaagaggggaggccccgcaaaggtggtgtggtatctcccaattgcggagcgcatgaagagaatgtttgcgaataaggaacaagctaagctagtgcgctggcatgccgaagaacggaaagtcgatagtatgctgaggcacccagcagattcagtacagtggaggacaatcgataggatttaccaggaattctcaaatgacccaagaaacatgcgtttcgcaatgtgtacggacggcattaatccatttggtgatttgagtagtcgtcacagtacatggctagttctgcttgttaactataacctttctccctggttgtgcttcaaaagaaagtatattatgcttgccatgctcattcaaggaccgagacaacctggcaacgatatcgacgtgttccttgaactaataatcgatgacttcgaaaggctatgtaatgagggcacacgaacataggacgcatatgcacaagagtatttcaacctctatgcgatgttgttttgtaccatcaacgattatccggcccttggcaacctttctagctaaactgtgaaagggaaatggacgtgttcgtgagtgtatggaggaaacaagaagcaaatggtgtctacatgggtcacaggagatttctcccaaggtatcacccgtataggaatatgagaaagaatttcaatggacacaaagatacagccggacccccagcagagctaacagggatagaggtgcacaacttagtgatgggaataaccaacgagtttggaaaaaaagagaaaagttggaaagtcaaaagagaagagcatgtcaaaggaaaaaacagaggagcatgtggaaaaacaaaagacaaaagagatgagcatgtggaaaaagaagtcaatattttggagactaccataatggaaggatcttgaagttcgccactgcatagatttgatgcatgtcgagaaaaatgtatgcgagagtttaatgggattactgcttaacccagctactacaaaggatggtctcaacgcctgacgagatctggaagaaatgggtgttcgctcggaactacatcccataaccacggaatccggcagggtttacattcctccagcctgctacactctctcgaaagaagagaagattgatttgctaacatgtttgagtggtataaaggttccatctggttactcatcaagaatcagtaggctcgtttcactgcaagatcttaagttggtaggaatgaagtcgcatgattgccacgttcttatcacacagctgttgcccgttgcaataaggaatacttttcctcctaaggtgcgacacacgatccagcggttgtgttccttcttccatgcaatcggccagaagatcattgatcccgagggactagatgaactacaggctgaacttgtgagaaccctatgtcatcttgagatgtactttcctccaactttctttgacataatggaacatattcccgtgcaccttgtgaggcaaacaaagtgttgtggtccagcattcatgacgcagatgtatccttgcgaaaggtacctggggatccttaagggttatgtacgtaaccgttcacaccccgaggggagtatcatcgagagttacaccaccgaagaggtcatcgatttttgtgtggactacatgtcagaaacatcttcaattggattaccacgatctcatcacgaagggaggcttgatggtgttggtactgttggaagaaagactgttaggttggatcggaaggtgtacgataaagctcatttcacggtactgcagcatatgactgaggtggtgccgtacgttgacgaacaccttgcagttctccgacaggagaacccaggccgatcagagagttgggtcagaaataagcacatgtcttctttcaacgagtggctgaagaaccgaattgccaggttgcagaacctttctagtgaaacacttcagtggttatcacagggtcctgaatggagtgccaccacttggcaaggatatgacataaatggatacacctttcacacggtaaagcaaaacagcaaatgcacagtgcagaacagtgggttacgcatcgaggctgctagtgacggtggttggcgtgatcaatactatggtagagttgagcaaatattggagctagattacttgaagttcaaagtcccgttgtttcgttgtcaatgggtcgatctttgcaatgtaaaagttgacaatgaaggtttcaccactgtcaacttagctaacaacgcgtacaaggatgaaccgttcgttctcgcccaacaagttgttcaagtgttctacatagttgacccgtgtaacaagaaactacatgttgttcgtgaagggaaaaggagaattgttggattggacaatattgcagactaggatgattacaaccagcacgtccacagcataggtcaagaaatacctctagaagatgaggaagaagaagatggcgttcaatatgcacgcgtcaaccatgaggaaggattatttttgtaatttatgtacgtagtttatgtctacatgtctgttatctatatgactctaatatgttcgcaatgatcaatagtatattgcttatgaaatagtcaaataaaataattaagtgaagcacccactagaagtgaaataaaataattaagcaagtataaccatcggaacaaaaataaaataaaaatgtagtgtatgtggaaatatgttaaggaaaataaaagaactaagtgaaatagaataaaattaaataaaatattgtagtccatgtagtcaaactcacctgtcacaggctctaactgtgaggccgtcacaggtgcccagaacgctgggcccgtcacaggtggcctcagctgtgacgaacccgctctttgcgcccgtcacaggtgacctcacttgtgacggccccacagttggcgcccatcacaggtgagtttgactagggttaacctagggttggacctcttctagatccagatccggccactctctcactctcactcactctctcgaccgccacctcgaccgccgacgctgctcgccctcgccgcctcgccctctccgccctcctctccaccgtcgccgcctcgccctctccgccgccatctctgccgccctctacgccttcctctccaccgccgcccctcgtcctctccgccgtccatccatcgacttccccgacctccccgaccccgacctccccgacaccgggatccacgatgccgtccacctccacctccacgacgccgggaccccgaccactgccgccctctccgtcgccatctccaccaccactgccgcctcgacctctccaccgccgcccactctgccaccatctccaccaccgccctcgtgtgtttgccgccgtccgtccatcaccggccccgacctccccgaccccaacctccccgacgcctggattgacgacatcggcctgcaccgccgaccgcctcgacctcttcgccgctgcctctccgccctcgtcttcgccgccgccgggatccaggacgcctacggcctgcgccgccttctccaagtacgccaccaccctccccccttcctccttttttcgatggatgaattgcattgtttagatgaatgaaatgtgatttgttgtttcgattgttggtgctgctgtgtagatgaattaaatgtgatttgttgtctgtagatgttttggatgaatgtaggggctagattttggatgaatgcaatattagaggaattattctattggtattagaggatcttagcatgaattttgctgcagtggatgttcttttctttatggataagaacagattatctacacttgttgatttatatacccttgttatctatgaataggtgaattgcatgaattattgtttatatacatgatttatatacccttgctgtctatgaataggtgatttgcatgaattgttgtttatatacatgatttatatacccttgctgtctatgaataagtgaattgcatgaattgttgtttatatacatgatttatatacccttgctgctgctgttttagaaattattgtgggctgttttattatctacacttgcccctgcttgataaattaattgtgggctgtttaagaaattattgccatgggtatgataattttttttgatgccttgctgtctatgtttgcccatgctgctgcctatggttgccttatattaaatagccagtgatgaatgctcaagaacagaaatacctctaaacttgttctttttttaatgcataagaacagattatctacacttgttctttttttttatgtacacttattcttttttgatgaattgctgttgctgctgctacccctgctgcccctgtgccccttattcatttttttatgcatagattatctacacttgttctttttttaatgcataagaacagattatctacacttgttctttttttatgcataagaattgcccctgaatgcctgattttgatgaattttgatgattgttataaaatgaattgatgctgctgctgctgctgctgctcttatagaatgagtgttctttttaatgcataagaacatattatctacacttgttcttttttttatgtacacttgttcttttttctggattgataagaggagactatctacacttggttcttttttacgctttactttgggttgcttttccctcctattagctgatttcctcttctttttcccttcatgcaaatgatggtaattgatgcataatttctgagcaaaactgaggccatatgtttcatagtataccccgtattacattggttctaatgttatttagtataatggtaggaaatttataagctttttggggaaaattagaccatgacaacgcccggcgcaaacccgccctccccaacacctgcaaggatacaggaaaagcaaacccagccacggagacagttgccgaaagtcatccctcgacaacggcggtcgaacaatccaaaattcatgataatttataggataatttttcaccatatgaccacaaaattttagctagcaccccttagcatatgttgccttctgtctgcgctgcagaatcgccccaggaataacatacgtcgatgtcggacgggacaagtgcaagtaggtcgagtagaaatccccggtcacaaaatatatggccgaccacattgcaagttataagagaggttgacgctagtggtaggcccacggcgccgaggactgtcattggaagatggtctaactgctgcgggctggcggcacgtgagaatttcgggatcctccataaagatatcgacaaggtcacaaaagccgagaaagagcgagcttggacggcaatggagaaatggttcacatttccggctaaagcaaaggataggctcaagcggaaggcattccataagatgggcaaagcttggaagaattggaagtcgaagcttttcaccgagtttgtcaacctgcccggcaatcatacgccgttcgatgaataccctcaaataaccgaagcagtgtgggaggaattctgctctctcaagaacacccaagagtttagggaatcaagcgaggcacatcgcctactgcagcagcggaatgagcacccgcatcggctgggcaccgcagggtacatcggcaagaaggcaatatgggcccaagaagatgcagccgctgcagcagcaaatgtccctaccccgttttcagacatccctgaacaaagagctcgcaactgtgcgcgggaaggggtaaggtcaacccagacggctctgtcacatttgagaacaaaagtgatgccgtcgtctatcaggaactggtgagttcactacttaacctaactaatttccgttcgtataaagtagaagttcgtataaacgactcttttttttctagttgggcttggttgctgaacaagcttcacaaagcgaggttgagtccgcgccgaagaggcgcgaagatgacatcctcacaaaggggctcggaaccaaagaacatcctggccggactaggggaattggtagcgatgtgccctggaagcatggactcccgcagtacagctcccaatacaggaaacggaaagtctccaaggaagaaagggacgctcgtttgaaggccgaacttaaggttgaggtcattcaagaactagaagctagcatgaacgctagggtggaagaaaggtttaacaaggtcctcgccaacatgaatataccccgaggcacaacacctgctgtgcatccaactcctcgtgcacaacacgacgcgagtccgtcacagcataggagtagttgtgcatccacagaggtgccggcccctggtctcccggtcgcaccactagctgcagtggaccacatagaggtaattgatgttatccgatctatatctaataaaaaacctttacacgttccaatattaaattcaaactttcacatgtgcagggcgtagcacagtgtgtcctactggcgagggtccacccaactttcgctcccgaagtcgctgagggcatggctttcaagccctcggttacagacaaggtccactgcgcatacctgctagctgggtatgccaaggtgtccaacgatacagtaaaggacacctggtcaggctatccgctgcccgtgccccccaatgatgaaatcatgactttgggcgatgcgcgcaagacgttcatacaatggcccaaagaagacatagttgtgaagatgactcctcgtccaagtcgaccgacggagcttacacctcccaagtctaagctatcaattgaggctccccgtggaccggcattgtcagtacctcattctcctgatggagctaatatggacttggcagatatagctcaaagcttggctctaataaagaccacaagaaaggctgatagctccccgccacttatcaagggccagaagcgtgaacgcggcaaggggaaggtcgggaagttggcaccggagccaaaaaggggcaaggctgtgacgtcgatgccggtgagcaaagcggggaaggtcgtgagggcgccggcccaatttgagctaggcatgctattggtggaggacaatgtgttagccgtgatgggtattgcttgccgagagctacataagcaatacatgaagctaagcaatgccaagcaaaaaatgagggtcatccatagttggacatcacgaccaccaaccgttcctatcatcgcctgcctatataactataggctttgatgacctcttcgacctttttaggatccggaagttggacactggtcttctaaaatgctactccttgtaagtgcataccttctatacttgtgatatgattggactatatctcctaattaaattagttctaatatgtaaatgttttaaggttgtgttggatcgagagtcgtcgccttggtaatcaggttgggttccttgatccatccatggtgaacgaggttaatttacgacagagcttcactgaggtggttgactatgtcaaccggtgtttatgggcccatcaagacaaggagtacatcatgtgcgcacacaaccaagagtaagaggacaatacccttcgtgtatattgtttttgaagttaaggttcttagtactaacgctacataaccactgcgcaggcgacattggattctcctagtcatcgtacctaagtggagtagggttacctaccttaactccaataagtccaaagattatgatttcactgaaatcaccaaggccttaaatatggcttggggcccatatgtggaaaagggtggtaggcacaaggagggcaaggacgaactttatcatgacaccaagttcgcatgcgcacaacagatcgaagaccaatgtggtttccacgtgtgccacaacatgtcaacacttctaagagaggtgaaagatttcgaccctgaggttgttgctaatggcgaataagctcatttcaataccaacattgctattcaaaacgtgctaacctcttatttattaaacagaaaggtagaactggcttcaagatctcacccatcaaccccccccccccgctatcagaggcgaagtgtgcgccttcattcttgcagaaataatgaacaagaaaggacgttttcacgtcaaatagactcatgaatttggctagataatttattgtgacgtaaaaaagatgtttttataatttcttgtgatgtaaaaaaatatgtttttatcgagtgcaatgtaatttactttcatatgtgcaatatttatggtagtttactaaattgtcatcaaatttaatcaactacgatttacgttatactattcatttattttctcctttttttttcttattgacaggtcgtggaggtcgaggacattatgactttaatccatttggtaagtatatatgcggttctatgagcaatgaccgaaattgtggctttcaagaggtgtgaatttgctgtgcaaaattgtggcatttgaactgcatatgtgaatgatgtcaatttttgatatggatctgtgttgttggggatctgtgatatttgagatggatctgtgatgttatattggaggggtgactcgaatatatctgtgatgtatctgtgtttcagagggcatggctagcaaatcctgaggctagccaatattgagcatttattttttttctggaattaactcatcagtgacgggttggaacaaaaatccgtcaaaggtaaactcacctgtgacggactagcaaataaaggcctgtcagaggtgacctacctgtgatgggcctttacttttgaggccgtcacaggtagatcacttgtcacagcttctatctacggagaccatcacctctgacggcctttatttaaagggccgtcagagatgagtcacctgtgacgggtcccaactcgccctaggctagcggagaccaacacctctgacagccttctagtaacttgcccgtcagaggtgggtgtcacctgtgacggccggccacccgtcaaaggtgggtgtcacctgtgacggtcggccacccgtcaaaggtgactggactcatcagtgaccactgatcactgaccatgcgcgaagccgccaaagatgagggtttgggcccgtcacaggtgaccttggccagtgtagtgtagattagatggggctggtcatgggctgaagattagatgaaatattcctttttgtgactatcaacatgcatgcagttagctgattattaatgaagagttaactgccatgatgcctggaatttttagaagtgcattttcaggtgcctgtcatgcttttgacacaaatgaatacattgactttgccatattcttttggtgtgcagttttctgatatgtgatgtctacgggccttttgtttgctgcaccaaggatgcaaggaaacgtcttgtgttatacctgggaaagtgttgttactatatactccctcaattccaaattgatctctatatattttataggtacaccaaaaccaagaaaagctaataactctctcatactatatttactctagcaacaaactctatgcatgcaccatccccactatttcctagctaatagcaaatcaagatattgcatgtgggttataaatacttgtgtgcatggatgcatgcatcaatgtccatttactccaatgcacaaataacgaatatacttaatgaatgaacacaaatatatagatcatttagcaataacctaaaaaaactatatgtagatcaatttggaatggaggaagtagaactcttaaggaaaccaagctcaaattaatattaatgatttagctttagttaacatagttttatcttgttcaatttaatacttgttattgtgagagacatgtgcgtgttctaaactcaatgtgcattggcttctaatgttggttgcctgttctttttccaatactgtaacaattatgacatggattttgtagctggtcttcagtatcatttttaattttccaaaattttcatagttttctaggcttttttatgtatttttatgcattttcctgaaaattcagatttttgttgtgcagtatttcgaaatttctacgtgatatttgaattttttttaatgaaattataaaactgaagtgatatctcacggctcactattattgaaacacaccaatacacaaagatcccatggtggaggggattgacgaggggattgagtgttgggaggggatccacccaagtggtgtacgttttccctaggaaaaaaatcctccccacatacttatcaaacaaggtctccctagtagtgttttccctggaaaaatcctccccatataccgaacaaggtctcaatgagtgtttttgactaggaaggctttaccatcccggtccttgtaaatttatgagctgagattacaacagtttgcgtatctgttcatctagagctattcaatctcgtgtttctgactaggaagactttcccatcctgatccttgtaaatttatgagctgaaattacaatagattgaatatctcatcatctagaactattcagtctctagacgaactttatttagccttatcgatctgttactattaaatggtgacctctctctctagtggagtaaaggattgggggtctttgatattgctccgtatggctacgctgcaacctgcagttgcgttataaatacgttaattaacttgcaaccagcagtttaccaaacaaatataaacgttttcttttttgacaaaatatatataaacgtatttgcggcatcaaccgcagcatcattttctatggctggctactgtggctacagcgctgcactattgcagcacggccacagccagtgctctaacgagcaggtccattcgttacttcgataattaagctaatagatggggtaatcattatcataaaatccaaaaatgttgctatcaaaacaatttggctcatatatctcgctatttgaccgcctctttgttacttcatccgtttcacaatgtaagtcattctagcattttccacatttatattgatgctaacgaatttgtctagattcattaaagattcattagcattaatatgaatgtggaaaatactataatgacttacattgtgaaacggagggagtagaaccatagccacattgcccccatccttcccaaaatagtttgtggcagtggatcgacacttccatttttttcatctttcgtagtggattggacaccggaccgaccggtactacgtactctctggtttgtaatactttctccactccatttcatattataagatatctttatttttttaagtctattttttaagtttaatatatttatatagaaatatagcaatatctgtaacaccaaaatagtatcactaaatataattttgagaatattttatattgtatttgttttatattaaaaatgttgttacgttttcatacaaacttgattagaattacataagtttgatttaggaaatactaataacccttataatataaaacggaggagcactggtcggcttaaatatacaccaatatcttacattttagatggaggtaatataatttattttgtttggacttggtaaaacattagagtaacactttttcatatttaaatgaaataaaacatttaaatatatgtccaaagaacaacagcgtaatctattaaaaaaattaggggtgggtagatatgttatacacactctttttggcttcacacacacactcggacacacatctccaatcttgagcacacagccacacacacacacaccatatcgctcaagttccaatggaggtacaggaactagtaccgtcgccatggtcgtcgtcctcgtccttcctagtgctcgtgctggccaccttgctcttcgtcgccgccttcctccggcggcgacagggagcgcggcgcaagtacaacatcccgccggggcctcgcccatggccggtgatcggcaacctgaacctgatcggcgccctcccgtaccgctccatccgcgacctctcccggcggtacggcccgctcatgtccctccggttcggctccttccccgtcgtcgtgggctcgtcggtggacatggccaggtacttcctgagggccaacgacctggcgttcctggaccggccgaggacggccgccggcaggtacaccgtgtacaactacgccggcgtgctgtggtcgcactacggcgagtactggcgccaggcgcgccggctgtgggtcacggagctcctcagcgcgcggaggctggcgtcgacggagcacgtccgtgccgaggaggtgcgcgccatgctgcgcggcctgagccgccgcgcgggcgccggcaccgccgtggtgctcaaggagcacatgctcatggtgacgctcaacgtcatctcgcgcatggtgttcgggaagaagtacatcgtcgaggagggggagggttcgtcgccgacgacggcggaggagttcaggttagggttttaaatctccagctatagctgccgttatcttcggctataataagtttgagaagggctctagctattaatttgctctcatttataacttagccgctatatatagctccatttagcctggtcggtattgctgctgctataaactatttgagaagactaactgctaaatatcttagcccgttattcaaaacgttggttggttcaggtggatgatcgaggagatcttcttcctcaacggcgtgttcaacatcggcgacatggtcccgtggctggggtggctggacccgcaggggtacatcgggaggatgaagaggctgggcggcatgttcgaccggttcctggagcacatcctggacgagcacgtcgagcggcggcggcgagagggcgacgggttcgccgccagggacatggtcgacctgctgctgcagttcgccgacgatcccagcctcaaggttcccatccagcgggatggcgtcaaagcattcattctggtataactacttgtttcattattaaatatacttgacgttttatatatacttttatatatcaaaaacagaggaagtctatgctacaacatactgtttcaattcatccaagagaataaagcatatgcagtttttttttaaaaaaagatattaagattgtggttagaaatggttgcgtggttggttgagataggaagatgacggagaaattaaattaggagaggttatggttgattaagatgggagtatgtgctagtaaaagctttgtaagcatcttgaaaaaaaaataggtgaaaccccgcacattgctgcgagaatttactatgataacaataaaaaaataacttgtaagatagctagataacatcagattaagtaaattaatgtggtttataataatttaaatttaaatagtatgtagaatggtgattcaaacgtaaaaagtaaggttgtatgactttatggaagaagaaaaatagagagatagtttggacgtagattaatcatctaaaggttaaaaataattgatgtgatttgacttaattagaaaaaaaaagagaaagataatttgtaccatagattaatcatttaagcactaactaagtgagaatgaactatataagtatataggatatcattaaacataataaagatatacattgaaacattatgtgaattatgctggatgataatttaatatgtttgtatttgaaaagctcttaaattataaaaactataaagatatagcaagtttacatgatgtttaaatgtgatgattgttagtggatgatgatgtggcatcttgttaattagtggatgatgatgtgacatcttgtttagtgaatgatgatgtagcatctttgcatgttaagtttaaggagttagtgggggataactttatagtaagataggatttaaaactccaaatgttctaataaaagcgctagtaaaagcattgtaagcatctgaacatacttacatcgaccattaacaaaactattgaatactccgcgtgtttgtagcaagaaatttacaaaaatgttttggacagctcgtagaaaaaaattttgaaaatcacagtaaaaaaccaatttataactcatatattctttttttgacggtctaaccatcaaatgtaactataatatatttatagtgtaattatattataactaatatataatcataaatgtaatttagatgtaaattatatgtaactataaaaaacaagttagctcgctgatagtgatgggtgcctacgactaaaagatcacggattcgagtcttggcgcgtgtaagtggtttttgtttctcttgtcacatgcaggaatctcagctactccgttctttttgaagcagaataaaatcatgaatttatatgttaattaatgtggattgcacgatagtatttgtcatcttgtaaataatagtacatggattgttgtgatatccaaattaatgatgcgtggcggctgcaggagctgatcacgggcagcacggacacaacatcggtgtcggtggagtgggccatgtcggaggtcctgaggaatccgtccgtcctcgccagggccaccgacgagctggaccgcgtggtcggccgccgccgcctcgtcgccgagggcgacatccccaacctcccctacctcgacgccgtcgtcaaggagagcatgcggctccaccccgtcgtgccgctcctcgtcccgcgcgtctcccgcgaggacgccttctccgtctccgtcgccggcgccgccgctagctacgacatcccggcgggcacccgcgtgctcgtcaacgtgtgggccatcgggcgcgacccggcggtgtggggggacgacgcggaggagttccggccggagcggttcgccgccggcggggagcgcggcggcgtggacgtgaaggggcaggacttcgagctgctgccgtttgggtcggggcggcggatgtgcccggggttcggactggggttgaagatggtgcagctgacgctggcgaatctgctgcacggcttcgcgtggaggctccccggcggcgcggcggcggaggagctgagcatggaggagaagttcgggatatccgtctcccggttggtccagctcaaggccattcccgagcccaagctcccggcacatctctatgatgaataattcatgcactgacgggccgcatgcatgtatgctcgtatgtgcgctctctctctctctctctgagttcatagttatattttactgcagagtacttgtttatttatcgatctacacgcagatgataaacggagtacagtataatgaaaaaaagtttttctttttttttactgtacctttagatggtcctgggtcgtctactagttcagatccaaagaccagcgatataatttgttttttttaaacagtagacggtaggagatctaccggatatattagaagaagagagttgatcctgtttattaggaaaatcaggtcaaaaaccatacaactgtacagcttactaaaaggaaaccggcaaaaaaccttacacaaaagacacgaaaagcatgcgataaaactacaaaccacagtagtgaccgaggggagagcaataccttcaaggcgaagcctccaaggaggtgaacaacgacataagccactgtcgactcccgcccaaagaactaggctgggttttcacccaaagggagagagagtccacaaggcaacacctccaagaaggaaacggcgcccgcaggcatcgatgtcgccgatcctggaagaccagacaaggctttcgcttaagattccctcaaaggtgtagagcctataagaaaccagagtcaaagtgttaagtgttatcgttgcccagctcatcggctagacccgatgcagcaactccgactccgtcttaacacagaaactctagcattgtagagggcaagcaccccactcaaaactcggcactacgacaggttcatacagacacaggacacttaaagcatcggcgagacccaaaagccttgactacagacacactggaccccaaacacggacaaacacttctcctcaataaccgaaaggctccacgaccgggtctggagacggccaaaagaagagaggagcaccaaggagtgaaggagtcgtggccggcatgaaaaggaactgagagctgaagtcaggggcaacaaagaccactgtgtcttccatgattccggcaaggaactccggctatcgcgggacaatccttacgactgcagcaaccaccaccaacttcaccgccagcgcagagaaaggtacaccagggcgagcagaagagcaactaagaagaagcgatggtgagaggaagggaggaagggatgtggggtggggggaggaaggaaatgaggggcctcagcagctgccggcgatggccggaggaacagagaggaaaagagaaaggaggaagaaagcaaggaagaagaaacgggtggttgcagggacggcttccgcagttgccagcgacagggggggtggccggacgccaaactcgccaacccggagccgactgatgccgcgctgccacgcgggcactggcaatccgccgcccacgctccggcgcccgcacggccgagcatgaccgccacctcgtgagcagacttgcgcgacgatccggccgcctcgcaagtcgccagacgccgcagcagccgccgccagccgggccacctccgcttcacgccgccccacgacaccgccaccgacgcaccgtctagatccggcgacggcgtctagctgggatccctcgccgccgccactccccaccgccggcgaaaactccacctcccccatgcctgagaggggaaaccaccgcggtggagaagtaaattaggaaacaaattgcatgtcatttaataggtaaaatttgttggacaaacgagactaaatcagtcgattaggaggcacttgacgaggcggcggttagaagggacgatgcatcggcggttctgcgtaattcagatgaaggcgacgaccgtagtaataacattaaaggtttgcaacctcgccagcgcagggcaggctggaacaaggccattctactcgactgctcgtccttgccacactagtacagatccttctatctgtgacgggctctaatatgcttagaaatagcgggccgtcacaaggaagtcatctcaatcgggccgaaaagtgcccgattgagatatggtcgcacagacatgttagatgggtataaaacttaagcccgtcacggatgatacctatcagtgacgggccacaactttaggcccgattgagataacattccatatctcaaacgggcctaaagttgtggcccgtcacagatgaccatcatttatgacgggccacaactttgggcccatttgagataacattccatatctcaaacgggcctcaagttgtggcccgtcacaaatgaccatcatctgtgacgtgcaccaacttgaggcccgtttgagataacaactaggcccgtcacagatgactcatcagtgacgggctatatacttaatctctatcgggcattaactaaagcccgtcaccgatgactatttttccatttttcatatgaaatgtttatatttgtaagttgactatagcaaaataattttacgggtagtaaatgatttcaaatggaaaaaatgtcaacaacaaagttgtataacttatcaatatttacaacttttagtttggtcatttttcaatataacatttttttgaacagtttgaatttgaatttaaaaatatgacaacttcaaacaacattttcaaatactaaatgatttcaatggaaaaagtcatcaacaacaaagttgaataactcatcaagatctaaaacttttatttttgttatttcttcatctgacgaaatgttattaatattattcacaaattttacatatatgtgttatagtttataaaaccagataagagatatgtcaattttataaacaatgttactatcactttgtcgtatgaagaaatgaccaaaataaaagttttagatcttgatgagttattcaactttgttgttgataactttttcagttgatatcatttagtatttgaaaatattgtttgaagttgttatattttcaaattcaaattcaaacggttcaaaaaatgttatatagaaaaatgaccaaaataaaagttatagattttgatgagttatacaactttgttgttgatgactttttcagttgaagtcgttcactgatctaaaattctatttgaactttttaaactttgaatttcaaatttaaaattgtttaaatagagtcagatggagaaatgaccaaaataaaaattttgcacctcgatgagttctacaactttggttttggtgacttttccatttgaaatcatttagtaaccccaatttgacatcctggcctagggcataataggattaatagaatactcataccaacatgttacaattacttttccagaagccaatctctaaagaattttgacgttaagtatgcttggtctggagcaattttgggatgggtgaccgaccgggaaatttgaaagcgtgggtgcacacgagtgagggctagccaaaaaatgaaatttatttaattttggaatatactcatctgtgatgggcattactcaaatttgaacttcctgcgtgggtgcacacgagtgagggctagccaaaaaatgaaatttatttatttttggaatatactcatctgtgatgggcattactctagcataagttaatgtaatgcccgtcacagatgattaatgcccgtcacagataagggtcatctgtataagggtcatctgtgacgggcgctagttgtggcccgattaagataggtcatctgtgacgggctatagtttgactggtcgtctgggtcaaaactatcggtgacgggctttacttatggcccgattgagatagaatcatgcgtgacggccgtttgcccgattgagatagctcttcacatcagtgacttctagcatgtgacggacgccatgcccgattgagatgggacttaccgcccgattaagatgagggtatccgttctagtgcctgctccaaaaatcccgcgttagccgttgcttagcactaggatgggcgcctgcgattggcggcgcggtaggaggggtggtgccgccatgcccgtgctcgcgcgaggggaaggagaccgatggcagatgatggccaagagcacgagattgtggcggtggccggccgtcctcctgcatcgtcaaatcatgatggattgttattggacctgcaaactcagcccgtttggtccatcatgaataagttcactttgactccattactctgaaccgcaaaactagatatcttatctctaaactgttaaaaccggtgcaatttgattccctcgacgattttaacgtggcatgttaaaaaaatcaaacttataatatgaaataaatagtcccatgaaaaaaaattagcagcccactcccaataacaaccagcaacccatagttctaagaagaaaagaaaaaaaataaaaatagcagaaaagcaaaataaaaataaaaaggggcaggcgaagagaggaaagagaagacgaaggagaagggagatcctcttcccgctctattcccttcccttcccttccttgccgacccccgtaatattcccttctcctcctcctcccgcttgctttcctttcccctcactctctctagctcgctcgctcccaccacctttctttgctttctttgaccaccaccattgtccccctccgctccacatgctgtggcgggcgctgtggtggtggcggcggtgggtcgccgtcgcgggcgcggtggcgtggttgttggcggcggcggtgcggccggcgggcgcggcgtggtgcatcgcgaggagcggggcggcggagaggacggtgcaggcggcgctggactacgcgtgcggccccgcggggggagccgactgcgccccgatccaggccagcggcctctgctacctccccaacaccctcgccgcccacgcctcctacgccttcaactccgtcttccagcgcgcccgcgccgcccccggcgcctgcgacttcgccggcaccgccaccatcaccctcaccgaccccagtcagtagtcctctcatctcctctaatcatccaccgccatgaaatccatccatgattactgtagtatcatcggttcattgtcctgcgtatccatccatctctgcttctcttttgcttttgctttttttgttttttgcttggtctccgagtatgtctgtctcttttgcttttttcctgcttcggtattaccattgccacactatactagtgctgctttggtagtagctgcttttcttttctgaagctttggtgttgtttcttgcaacgtctttgccgggttcgtacgattcatatccatctttctttctctagtttcctgtttgctaacttttctttctgttttctagtacgtaatcatgtgataaaccgataaagacaagcaatgtcagtcagcatctttttttgaaaaaacttttcgattgtttcttgtgtgctatctttgccttcccgctggtgataatcctgtagtatatcttcctttaatcttattgttgtagtgattaatcaggatctatctaagctaataatgctcactgccagtgccacaagagcatggatttcccttttcctgtttgttagttgttacattcattgcgcaatctgcaaattattctttgagaaaggaggagggaatgctttcaactccagttcaaatgaattcaactcaggccaatattattttcactattatttatgctccacaaaatcgatgactaactgtagatgagtccatgttataaaactgacataatgaagtgaagtggcagaacatacttaacatggctaatgtaaatctaatgacactactgcaaacacccgaacagaacaaaactgtattagggccatccatgtctattctaagctctttgtatttatgttaaaaatgatttttttcccttggggtaaatttggtgagacgtaaagaagtcagttcaagataccacttaatacttgatttgggggagaaaaaagtatgcatgactcttgtgctagttagaaccattgaggtggcagcctttctactattggtgttaacatgttgattgattggcttaaatgatgtttcctgacggagaatttcagataacgtattttctacaaaacaaaataccttcatcatgcaagtgcaacaggtgaatttatttatagccatcccaatttatcttcaatcctctttcgaagtgaaaaattgaataaaacacaccataattatacagtcagaaacgagtgatctacatggacatttttgtgattgtacatgcactcaaggtaagtttgtggtatgtatgtcttcaacaaaaacattcttaaggttctaagttctagacgttgattgctacctagcaccttctatatttctagcctacatgtttacatgcaattggcaatgtaacaaatgagttggatctgtaatggaagtattggaatcggaaataggtcttgaaattctcatatctaagttccctttcttctgatatagacatgtccttagtttttcctttttgtttctcttttagttttcttagtgcattgaggttgctttatattacatctactgtgtgcatccaatcatccatgctttcttgttatcttcttgagatctctcaaggtgcatactattttaactctgtgtgtacttctctctgtttttttttttttttttgcgaggtgaactgtgtgtacttactctgcttgttcctgtatttcaggctatggatcatgcacctacccagcatcaccaaggtacacgcatcacatattatcagtttattgatctgctccatatggagtacatctgctgaacgttcatctagaaatcacatctcatataaccaagcaaaatagtcttttagaagataaaattgagtaaaagcgcagcagcatacagagtgtctgagttgtatagatactagcttttagagctctctgatattcagttatttcacttcacagctattcttaactcccaccacaatggacagtgctcacttaattgcatgaattagacctgtacatcaaaataataatgccagttggtgtaactaatgggatttgaaagtaaacaccttttgtaaatgcattaagtccttaaagtgaaccaagtcagatccaagaaaaaagtttcattacagtgctctccttacagaaaatttctggttttccaaggacacagcctaatacacattgtcagtgtttgtacagaaaaaatcgtaatgatggtttattttttggtttagtatataactagttgggtggcccgcacaattgcgcggctagcacccatataaaattatatatttttaatataattttacttcaaatttattaaatagttatctcattgtcttaaaatttttaaagactaaaccttattatcctcgtgtttctattttttttagtttttaaaagtcacaacggttgctaccccttacttctgtcatattattctttatttgcttgcttgatctaccactagtttctatttattctccttggaacctttaaaaattggatcgaaaaacttataggtttagagtttattatcctgttcggcatcttttttataatttctagaagtcccgtcgaacactgccattatactcatctacgaccgtccactgcatcttctatttattgtcattgctattttaaaaattgaacataattatcgtttaggttcattttttttactttctagaagtttcggcaaaacgtcagcaactttgtcactgtactcctctacggctcacctgctgccgcccttctttattgtcgttgagattttaaaatcaaacaggattatcattggggtttttttttatttttttagaagccctaacctttaaaaattggaccttatagtttttaagtttattatcttgttgggttttatctttttataatttttagaaatcccgtcaaacgctgccaccatactcctatatgacccgtccgccacatactctttattgttattaggattctaaaagtcgaacataactatcattggaattcttttttttttactttctagaagacccaccaaccattggcgactttgccattgtactcctatacaacccgccgctgcctcttatttttattattattgagattttaaaaatcaaatatgactctcattggttttttttttactttctagaagtcgcgccacccgcctcgaccgattgcttcacgacctgtctgttgtaattccttttaatcgtcattacgattgtatttggtgttttattaatagtttttagatgtcccatcaaccgccaccactctgctcctctatagacctgttacttaattaatctcgtcatttgtttcatatggttttttcttttagtaatctttattttttatcaccaaatttagttatttataaattgtattcctagttgatatcttatttttctttttctcatttcagaatttatattatttttcgtattgtgttctttgatatttttatttttattttcagtttagttgttttaaaattgtattcctactttaactctctttttatttgcctaatttcagattatattttattttttattccgaattttagttaatctactattgggttcttatatgtactcttatttcaatattgtttatatttaattctaaattttagttaattttaaattatattcctacttgaactcatcttttcgtctcttttttctaattttgattttctttatttttattccgaattttaattaatatggacccttcttccaatattccttatttttaattccgaatttcagttatttttaaattgtattcctacttggacttttcttttcttttttttttgctaatttcagattttattttatttttattccgaattttaattaatctcgtattaggttcctatatggactcttctttcaatacttattatttttccgaatttcagctatttttaaattgtattcctacttagactctttctttttgctacggattttatttcatttttatttcgaattttgattaatgttgtattgggttcctatatgaaaatttctttcaatattgcttacttttaattctgaattttagctatttttaaattatatttctacttggactcttcttttcttttttttttctttttctccgattaatgtagaaatttctagcccccacagcgaacgtggtgccttctttcaagggtgttttaataatataatagatagatagatgttagtgaggttagcttgttaggatacacactacagccagacaacatggtttaacctgagttagaattcttgttttgagtaactcgaggaatattgtccaagggattgactattgatcaatccatgtatactcaaaagcgaaggggggacaccacaaaatagatttctgattgaaacaccaagtattcacaatcaaatttgatgtttattcgcaaacagttgtgtgaactctgcaaactactacaacattacaaaggaagtttagtatgaagctgtagttcttttctagaaaagaacctctgttcatttttaaatgtatttttgcctatcttttgtaaaatggaaaagtattttacgaaattgtattagaaatggattcactttgtgtagccgtgcattttatttattaatcgatgttttgagaaaaataaactgcatttatttttctgaaaaaaaaacatgtgcattttagcccttaatcgaccgacacgacacacatataaataagtttttattattctactgtgctttggattcaccagaaatcgtaacattcaaacctgtaatgttgctcaatcgcattacaaagcagatcaacagaaattacgttactgatgactaaaccgtaagacagttgaatataacaaaaagaaatagtcagtctgctgatcaaggtgagatctctgttttttttttctgtgcagcactgcagggcagtcaggatcaaccggcggcataccatcaccgccggccgccgacggcggtggcctgagccccccggacctcggctccagcgacgactctggcgccgccgcccgatcccgcctcgccgccgcgccattccttccccggcttgctctgtcctgtctcctcgtgtacttgctgcacacgcagcggtggtgatgaagggtgagagatttatatagcattgcatacattgttgcacaaagcggaatttgtaagaaaaagaacaccacatttttgttgatgggagacttggagagtagtggctcgtgtcgtgggcgtacgtagctagccgttggtgagaacctgcccccgttcaagctgaaaggggggctagagtgagtggcaacttggatcatgttggattcatatattctcttttgtttgtcaatctgtttgttgtttgagttttaagatttttcgtttagttttctagttttgcttttgcttctagttgtctagttactccaaaatatcaaataattctattttttaagtgtataataattaaaactgaattaattttgcgctaatggcttatacttattttgcatgcccttacttaatcctcatattcatgggttgcaaacaccacctaatgtgtgaaaccagcccaccacattgggccaattggcaggcaaattccttatttctcatgacccaaaaggacaatagatgtcaaataagattgtgtattttgttttctgttaaaatgatagtgtcaagggagcagcttagaatatgttcgccaaataggttaggaaatcatatctgcatccatttcaattttttaatcccacttctcataattcatgtcgaaacaagatttcggcaatactaaaaggggtggctatcaagctgaaaaagtggatgggttaagagacaaggaattttatacaagttcaggccttcttaatcaagaagtaataccctactcctgtccggagattgatccgccgagtatattattgatcgtatgatctgggtaaaaaaacgtgcccctagagacacccggacccttccttatataaaagaagaggtccgtattacaaaatacagtccatatccctaacggaataggtagttacaaataaaatacaatcgtaaccgactaggatctcaggtattaccttgacatacaagtttagaatttaacccgagtcattttaaagatattctatctatacatggcaccccatacccagtcggactatacatgccgtgtaggtatggggtatccataatctccacagtagcccctaagacctttacagtcaacgaaatagtcttctctcatgatccaaaacgataatccaagtactccgacttcttctcccctgatctcccgagtaccaaaatcaaagactgtgaaggtctgaaaatagaaaaaaccaggtgcatcgactagatgcacctaattaggtgtagcccccgactatgtgattagttaaaaaactaaacatatagtcaagatgcaaacaacatccaaccgagtggttttataaccgaatatcatacagcaaagaatatgcggcgttcaataaagcatccagccgaatgctttagctttaatatatcaaaaatggagatatgaagaggcctgagtgagaaacactctaaagatctataaatccacacatatgataagaatccgagtaaaaactcttaaaaagatccatcaaacgtggtataaatgtgataacataacaggtgatgagtctaaatagcctaggctatgactcacgccataatcaaaataagcatataacatgccgagtaaatgactgtattaaaaccagtcatctcaataaaacccaaacagcctttgcagcctaaaaaggtgtcacgcccggaaattcactagtaatttccgaacttatttgtgcataaaatcctcgtccaggaatcagccgaggtacacaaactgacaatttaatatacagattcatcaaattaactaaaacgataagtacttacttaagaggcacttagtcctcaccatgaagaaaactgcagcggaaaataaaatctagcgaagctccggctccactcccacaggcagctcaactggagtataagccaaacgtcttctccttctggatccttattcttcaactgaggttgattgattattgcaaggtgagcatatgacatactcagcaagccacacagcaaatatgcaagtgcacaaagataccaaaggatggcataatataggttcatttgcaaaagcagcatttagcaaaacttttaagagaagtaaaaacagtggagtgattaatcagaaattttaatcaacactgaacagcacacccatgctgcacaggcccaaccatcctgaacaaccatacccggctgtacagatctaactccaaaccaggagctaagcaaattattaccaggtataacatccataattattgtgagaggtgtgagactaatcacgaaaaacattgctcaacccgcccataaccgcgggcacggctattcgaatagttttactctggccagaggtgtaccactgtacccacaagacacagccccacatcatgtcaccatgtgcctcagtaccaccacggtacctcggaaaggagctgtgacattacccctcgcacaacacaatccaccacagtgcaccattcctggatcataatcacccccctcaaaaaccagaggcatggactccccagcgactcccgtgggcttatctccgccacttctcagtctggtgctctgcaatgaaccatgctatacgaaaggtaaagccgttgcccacgctggcttgtggttggcacggttaatgtttcacaatagtagctcgcgaaccggtccttaattgtcatgagcacgactctcaaaaccatgtgctcacaacccaccattatcaagttttagttggcaagtaattaattaaccaatcacgattgaccatcgtgaactatcattaagccaccattaaataatagtgaataataagttatcccaatagtgtgctaatgtttctaagcatggctaagcaattatatctaatatctagttgaaccaatatatatatagcccaactagtcaagttataatcacccaaggtatcaaggaataaagtaatcaagtacaaaagggccataacaaagaataggttaattccacccaatgacattcgaaaatagatgcaatagttgaatagaaacaatagctttaaataggatcaacatgctcaaagggttgtttgggatctgtgtgacttgccttgcaataatcggtcttcaattaatcttcttgaatacttccgacgcacttgcgaaccttcgcaacgacggaaacgacaagctaacacgcaaaacgaggaaaaagactaataaaaaccaaataaacaatacataaaaagtaaacaaacatgtagatcataattttagatgaattatgagacttgaacggcctcattctgacttcaaatgaatttattatgaattttacaagattaaatctaattaaagcccatttataaagaattaaataaattaaattcaatttatggataattttaatatgtagatctttattttatataatttttgcaacttgaaccacattaaactgagttcaaatgaattagttatgaaattttaaagattaaatcggattaaaacacttatattgattttaattgaattatgacgcaataatgaattatttttgaaaaggaaaaggttatttattgtgtcagcggctagggtttcgcagtgaaccgggtgcatagcaacggttcacgggaacggacggccgagatcgatccatccaaaacggacggccgagatcgatcggtccacgaccggctcacgggagagggcgacgatgacgtcggcgatgacgtcaccaccggcggcggcggctcggcggctcggacggcgcacgctcgctggcgaacggcggcgcttcggcacgaacggagagcaccaacgggtagagggcgacgcggcgaactcaccggtgaccaaaggagcggcggaggagcaacggacggcgacggcgacgaggttgaaacggcggcggagatcgggtcgacggcggcgatggtgctccggcgatcttcggcgatggcgaagcggcggacgaggacggcgacgacttggcgatcccgacggtggccttcccgagcgacaacgacgaccggaacggcggcggcgcacggctggagcgacggcggcgacggcggcgcgaagctacatggcgctagggcactacggacgatgagaggcgaaggcgagggtggcggcaggtagagaagagcttggggaaccttttaaaggggctcggaggcgacggcgaaggcccacggcggccggcgacgagaaggaaagatcggggtttgaaggaaagagaccgatccgattcgaactcgaatcaaacacattccaaaccgatttagccgatgtttccaaaggagaaaaggtagaggagatcccaaagattgtttcccctcaatcaatttcaccggaaacggaaaggaacgccggatttggaaaggaacggctgcggcgcgaaactagggtttcgggcggcggcggcggcgcgaggagaacgacgaccctgacaggtggggcccgcctgtcagcgactgagagagaaaaggaaggagcgcgggttgactgggccgactgggccggggagggagagaggaagagagaggttttgggccggctttcggcccaaagccaaaacagacttttaaaaacctttttcaatttaaattattcatgaaatgcaattccatttattaaaaatacttccttagctcaaataaatcctagaaaaatctaggaattatagaattaagcaaagtatttaacaaaattttatctagcccaattttatattgagatttaacaaattaaaattagatcttctcttctaggcttttaaaatcatttctaataattccttttaaacaacaatttataatttaaggattttaaacaagaaaaactcttaacaaatataattagatcattaatgatcaaataattactgaactgttgtttgtatcatttaggaattgagctccgaaaaatccgagaaaatttcaaagagttgacttaatcatggagaatttaataaaaattaaatccatccatgctttatattaaggaaattttatttcccacatttaacttcacttgtaagttaatgaacatttaatataacttctaataataatttattaaataatttataaatcctgaaacaaaaatcaggatgtgataaatctaccccccttacaaagaatctcgtcccgagattcggaacggctagaaagaaaagggcataggtaaactgcagtctatcttattccataactccgataattattctaaggctttaaagaaaactactgctgctttgaaactggtggctgagctgtaacacttgaaaacgcaactcttgaagacgcaactggcactgtattggctcctgtgacgacaatgttgttgacctgaccttgcggctgctgacgcttcggcttcggacactctcttgcaaagtggcctggcttgtaacagttgaaacatacctgctgctcccttccactactgttattctcttgagactgatcctgctgaactggcactaattgagtagcttgctcaacattatcttcattgctttcattagtctctaatttgatctcaccagcgatgttcaattgttgcgactgtccttgaccagcggaagaagattcaccaatttggagtggcttgatacgctgcctctagctactaccttgtgcctcctggaatacagtcattctccgtttacggttatccatcctgttcttcttgtcttcaagtcgaattgctttgtcaaccagctgctgaaaatcaacatagtcatgggagatcaatgtaactgacagttcatccttcaggccttctaggaacttctcctgcctttcctcgtcagtacgcacatcttctagagcataacgtgccagacgattgaactcatgaagatactctgccacggtatgatccttttgcttcaatgtcctgaactcacgcttcttcaaagaaacaactcctacaggtatgtgtgtcttcttgaatgcttccgtgaactccacccaagtgattggttgtccttctgctctgttcatccgaaaatgatcccaccattctgatgcaggtccttgcaactgatgtgaagcgaaaacaactttctcctgatccgtgcactggagcaattccaacttcttctcaacagcgtatagccaatcacctgcttccactgggttggtagtgctagaaaaggtaggtggcctcacacgaagaaaatcagctaacttgttctgcggcggtggagcattgttgttcccttggttgagctggttctgcatctgctgtatcatcatgttcattaactgagtctgttgagccagaacttgagcaagagttgggttcccttcattgttattgtttccacttccattggcgcgagtgttcaccatctgttgcatattagagaagatagaaggagaggggttacactaaagacaagaccttaaccaggttaatactgatctgatgtgtgtagaccattatattgttcaagttgattaagcaagcaacctagtatagttacacactcatcaatgaactactccaatgatgggaatgcaaccatacctacacacaaagcaaacaacaagcgttctaccctactaactattcctcaaagacactttggcggcataggttctaaggtaggatccaaacttcattccatcttgaccacttggcacttcggttcttcctcgatccacttgactggcctccataagtttaagtagacctcattggcgtcttcaagtttcaatgtctcagaactactcaagttgaaagagaaaggggagtagacaatgaaacaatttgcaaagaattctagataaggaagaaaggagaaattttcacaaatcatgttttcggaaaattagtccttaaggtttgaccatttggcttatcctacagtcgagatggctctgataccaacttgtcacgcccggaaattcactagtaatttccgaacttatttgtgcataaaatcctcgtccaggaatcagccgaggtacacaaactgacaatttaatatacagattcatcaaattaactaaaacgataagtacttacttaagaggcacttagtcctcaccatgaagaaaactgcagcggaaaataaaatctagcgaagctccggctccactcccacaggcagctcaactggggtataagccaaacgtcttctccttctggatccttattcttcaactgaggttgattgattattgcaaggtgagcatatgacatactcagcaagccacacagcaaatatgcaagtgcacaaagataccaaaggatggcataatataggttcatttgcaaaaacaacatttagcaaaacttttaagagaagtaaaaacagtggagtgattaatcagaaattttaatcaacactgaatagcacacccatgctgcacaggctcaaccatcctgaacaaccatacccggctgtacagatctaactccaaaccaggagctaagcaaattattaccaggtataacatccataattattgtgagaggtgtgagactaatcacgaaaaacattgctcaacccacccataaccgcgggcacggctattcgaatagttttactctggccagaggtgtaccactgtacccacaagacacagccccacatcatgtcaccatgtgcctcagtaccaccacggtacctcggaaaggagctgtgacattacccctcgcacaacacaatcaaccacagtgcaccattcctggatcataatcaccccctcaaaaaccagaggcatggactccccagcgacccccgtgggcttatctccgccacttctcagtccggtgctctgcaatgaaccatgctatactgtcgcgtcccaaaacgaccctaaaatacatcctctaaattatgcctagaataatttaaaatccgtgtgaaagcctccaacaattaaaatgtgcaaagttaaaagtcaaataaggcttggaggatttttgtatatttcctaaaagcctaaaatgcgtaaataaattttagtggaattttcagagcacaaataataattaagaagaaataaacaaagttaaaaaggttttataaaaagaaaaacccaaaaaagtctttttcccccctccccctcttgggccggctcggcccacctccctccctctctctcctctcccccgcggcccatccggcctcctccccgcgcgcgtgccgctgacgggcgggcccgctcgccaccctcgctgacaggtggggcccacccgtcatcccctacctcccgccgctcccgccgcctcgcccgtgccctagcgccgccgccgccgcaaatcccgccgctcccgtccgccccgcgtgcaatcaagaggggggaaatattccccatgattccctccctctttccccccacttttccctctctctctccatcggattcgttcgggatcttttcccctaaacctcgccggcgcatcaatggcggccggatcttccgcggccgtttccccctcatccgaccgccctctctcactcccaaccatatataaacactccccgtgcctccctccaccgtttccgccactcgtcgctctctctccccgtcggaatcgagctcgcgccgtcgctctctctctccgccgtcgccgccgagctccggtccgccgccgtcgtcgccccggaccctctcccgcctcggcgccgcctccttcgggttcgccgcaacctcgccgacctcgtccacctctccgtttcggtcgccgatcgccggaacgccgccgtccccgtctacccgagccgcgccgtcgccttcctccgctccggtcaccgttcccgtcgtcgccgtcgacccggggtgagccgtggaccgccgattcgcttcccccttccctcccctctttcgggcgccgctccgccgcgccggtggtcgccggcggcgaccatcggggcgcgagtgcgccgcctcccgtcggctgtgccggcgtggccgccttcgggcgcgtcccgcggctgccatgtggggcccggccgtcagccgcccgcgccctcgggtgcggctgacgcatgggacccacggcgccggccggtgtgagccgggtgcacccggtccaccgtgggccgtgaggctgccgcgtgggccccactcccgtggacccggtccgcgcgccctctcccctcggctgacgcaataaatccatttttaaattaaaatttaaatgaagaaattcgcaaatattcatttaaagagcatataaccttcaaatggccataacttggccatttgaactcggaattggaccgttcaagtctctaatttttccttaacaagtcaagaacccatttttgtgctttgtttctgcttgttatatggagtttattagagtaaaagccttttcttttccgttggtcgtgtagacgctgcagcttcggaagatccgctcttcgtggaagttgaagccgacgtttgggaaagcgagcaaggcaagtcacatcatctttgaacatattgaatcccagtttataaaattatgttgatttaaattattgcattatcgctttatttaaattcccgcgttatcactgttttatttagccatgcctatttacctttgttatgaccttaatattgttattgttattatttccttgttcaccctagaataaacaaaaccccaactagtggacactctactcatggtaccactagtatgattttaggtagatgcttcgctgtttaattacgtaacattaggtgattttacaactctagactttgggatattcatatcacctggacactatggaatggtttggttattgtggaattggcttcacaccgctccttctattcaaaatccccaaaatggttttaggctgggctcggggtgcatggttttgatagtagcacctcggccatataaggaccggtcttcgggcctctgttgcaaagcactaccgtacttccacatgtctagtgggtaaggcttagtttgtggctcagtctggttataaacaaaagtacacggatggagatggaagaagtcgggggtcgatggacatctctaggacaaatgaaggctacacgagctgcggcccggtaatcgagatgtcatggcacagggccggtgtcctgctgctaggggctcagtcctgcctgcttgtcccgggagttccggccgtaggtgggattgggtcggtactcttgtctatggctaggatgggttggaaactatgtcacgtcttccgtctgtataccgtggtggtatgtggcacgtggttacacgtgaggaagatgtgtcttgtgggtaaagatgtacacctctgatcagagtataatctattcgaatagccgcgccctcggttatgggcaagccgagcaatgtacccaagttagtgttttagttcttaaaacctgcttaacaactaaaaggtggaatggttggcctgggttggcttgggacgagctgggacccagggtcgggttgccagttcggtctgaatcatcgtaggctttgggttaaggcaggttcgtgtgggttcacggccttgattaataattgtatagttctagaatcgtgtttacaaaatagctttgagcaactaaatatctttaaatgctgtttactgcaaccctaaccctttatagtataactcctttgtactcccttgcatttattctgcacttgtgggtgtgtcttgttgagtacggtggttgtactcagtcttgctcaatttttcccaaacccagaagaggagttcctggagcatgaaggctgcacaggcccaaccatcctgaacaaccatacccggctgtacagatctaactccaaaccaggagctaagcaaattattaccaggtataacatccataattattgtgagaggtgtgagactaatcacgaaaaacattgctcaacccgcccataaccgcgggcacggctattcgaatagttttactctggccagaggtgtaccactgtacccacaagacacagccccacatcatgtcaccatgtgcctcagtaccaccacggtacctcggaaaggagctgtgacattacccctcgcacaacacaatccaccacagtgcaccattcctggatcataatcacccccctcaaaaaccagaggcatggactccctagcgacccccgtgggcttatctccgccacttctcagtctggtgctctgcaatgaaccatgctatacgaaagttaaagccgttgcccacgctggcttgtggttggcacggttaatgtttcacaatagtagctcgcgaaccggtccttaattgtcatgagcacgactctcaaaaccatgtgctcacaacccaccattatcaagttttagttggcaagtaattaattaaccaatcacgattgaccatcgtgaactatcattaagccaccattaaataatagtgaataataagttatcccaatagtgtgctaatgtttctaagcatggctaagcaattatatctaatatctagttgaaccaatatatatatagcccaactagtcaagttataatcacccaaggtatcaaggaataaagtaatcaagtacaaaagggccataacaaagaataggttaattccacccaatgacattcgaaaatagatgcaatagttgaatagaaacaatagctttaaataggatcaacatgctcaaagggttgtttgggatctgtgtgacttgccttgcaataatcggtcttcaattaatcttcttgaatacttccgacgcacttgcgaaccttcgcaacgacggaaacgacaagctaatacgcaaaacgagaaaaaagactaataaaaaccaaataaacaatacataaaaagtaaacaaacatgtagatcataattttagatgaattatgagacttgaacggcctcattctgacttcaaatgaatttattatgaattttacaagattaaatctaattaaagcccatttataaagaattaaataaatttaattcaatttatggataattttaatatgtagatctttattttatataatttttgcaacttgaaccacattaaactgagttcaaatgaattagttatgaatttttaaagataaatcggattaaaacacttatattgattttaattgaattatgacgcaataatgaattatttttgaaaaggaaaagggaatttattgcgtcagcggctagggtttcgctgtgaaccgggtgcatggcaacggttcacgggaacggacggccgagatcgatccatccaaaacggacggccgagatcgatcggtccacgaccggctcacgggagagggcgacgatgacgtcggcgatgacgtcaccaccggcggcggcggctcggcggctcggacggcacacgctcgctggcgaacggcggcgcttcggcacaaacggagagcaccaacgggtagagggcgacgcggcgaactcaccggtgaccaaaggagcggcggaggagcaacggacggcgacggcgacgaggttgaaacggcggcggagatcgggtcgacggcggcgacggtgctccggcgatcttcggcgatggtgaagcggcggacgaggacagcgacgacttggcgatcccgacggtggccttcccgagcgacgacgacgaccggaacggcggcgtgtcacgaccggaattaacccaacgggcgttccttacgtgcgtgtattattccttgtcccaggaggcaaggtacaccaagagttgatacaattcagagtttaacaagcggaagcgtaaatagttcatttattacatgggcagcgaaggcccagcacacacaaagacaaacgagaaacagcggaaaactagggcgacgactacaggcacttgacggcaggcacgagctagacaccaaagccttcatgctccaggaactcctcttctgggtttgggaaaaattgagcaagactgagtacaaccaccgtactcaacaagacacacccacaagtgcagaataaatgcaagggagtacaaaggagttatactataaagggttagggttgcagtaaacagcatttaaagatatttagttgctcaaagctattttgtaaacacgattctagaactatataattattaatcaaggccgtgaacccacacgaacctgccttaacccaaagcctacgatgattcagaccgaactggcaacccgaccctgggtcccagctcgtcccaagccaacccaggccaaccattccaccttttagttgttaagcaggttttaagaactaaaacactaacttgggtacattgctcggcttgcccataaccgagggcgcggctattcgaatagattatactctgatcagaggtgtacatctttacccacaagacacatcttcctcacgtgtaaccacgtgccacataccaccacggtatacagacggaagacgtgacatagtttccaacccatcctagccatagacaagagtaccgacccaatcccacctacggccggaactcccgggacaggcaggcaggactgagcccctagcagcaggacaccggccctgtgccatgacatctcgactaccgggccgcagctcgtgtagccttcatttgtcctagagatgtccatcgacccccgacttcttccatctccatccgtgtacttcttccatctccatccgtgtacttttgtttataaccagactgagccacaaactaagccttacccactagacatgtggaagtacggtagtgctttgcaacagaggcccgaagaccggtccttatatggccgaggtgctactatcaaaaccatgcaccccgagcccagcctaaaaccattttggggattttgaatagaggggacggtgtgaatccaattccacaatactccaacaattccaaagtgtccaggttatatgaatatcctaaagtctagagttgtaaaaccgcctaatgttacctaattaaacagcgaagcatctacctaaaatcatactagtggtaccatgagtagagtgtccactagttggggttttgtttattctagggtgaacaaggaaataataacaataacaatattaaggtcataacaaaggtaaataggcatggctaaataaaacagtgataacgcgggaatttaaataaagcgataatgcaataatttaaatcaacataattttataaactgggattcaatatgttcaaagatgatgtgacttgccttgctcgctttcccaaacgtcggcttcaacttccacgaagagcggatcttccgaagctgcagcgtctacacgaccaacggaaaagaaaaggcttttactctaataaactctatataacaagcagaaacaaagcacaaaaatgggttcttgacttcttaaggaaaaattagagacttgaacggtccaattccgagttcaaatggccaagttatggccatttgaagtttatatgctctttaaatgaatatttgcgaatttcttcatttaaattttaatttaaaatagatttattgcgtcagccgaggggaggggcgcgcggaccgggtccacgggagtggggcccacgcggcagcctcacggtccacggtggaccgggtgcacccggctcacaccggccggcgccgtgggtcccatgcgtcagccgcacccgagggcgcgggcggctgacggccgggccccacatggcagccgcgggacgcgcccgaaggcggccacgccggcacagccgacgggaggtggcgcactcgcgccccgatggtcgccgccggcgaccaccggcgcggcggagcggcgcccgaaagaggggagggaagggggaagcgaatcggcggtccacggctcaccccgggtcgacggcgacgacgggaaggcggcggcgcggctcgggtagacggggacggcggcgttccggcgatcggcgaccgaaacggagaggtggacgaggtcggcgaggttgcggcgaacccgaaggaggcggcgccgaggcgggagagggttcggggcgacgacggcggcggaccggagctcggcggcgacggcggagagagagagcgacggcgcgagctcgattccgacggggagagagagcgacgagtggcggaaacggtggagggaggcacggggagcgtttatatagggttgggagtgagagagggcagtcggatgagggggaaacggccgcggaagatccggccgccattgatgcgccggcgaggttgaggggaaaagatcccgaacgaatccgatggagagagagagggaaaagtggggggaaagagggagggaatcacggggaatatttcccccctcttgattgcacgcggggcggacgggagcggcgggatttgcggcggcggcggcgctagggcacgggcgaggcggcgggagcggcgggaggaaggggatgacgggtgggccccacccgtcagcgagggtggcgggcgggcccgcccgtcagcggggagaggagagggagggggagggagctgggccgagccggcccaagagggggtggggggaaaaaaggactttttaggatttttctttttataaaacctttttaactttgtttatttcttcttaattattatttgtgctctgaaaattccactaaaatttatttacgcattttaggcttttaggaaatatacaaaaatcctccaagccttatttgacttttaactttgcacattttaattgttggaggctttcacatggattttaattattctaggcataatttcgaggatgtattttagagtcgttttgggacgcgacacggcggcgcacggctggagcgacggcggcgacggcggcgcgaagctacacggcgctagggcactacggacgatgagaggcgaaggcgagggtggcggcgggtagagaagagcttggggaaccttttaaaggggctcggaggcgacggcgaaggcccacggcggccggcgacgagaaggaaagatcggggtttgaaggaaagagaccgatccgattcgaactcgaatcaaacacattccaaaccgatttagccgatgtttccaaaggagaaaaggtagaggagatcccaaagattgtttcccctcaatcaatttcaccggaaacggctgcggcgcgaaactagggtttcgggcggcggcggcggcgcgaggagaacgacgaccctgacaggtggggcccgcctgtcagcgactgagagagaaaaggaaggagcgcgggctgactgggccgactaggccggggagggagagagaggaagagagaggttttgggccggctttcggcccaaagccaaaacagacttttaaaaacctttttcaatttaaattattcatgaaatgcaattccatttattaaaaatacttccttagctcaaataaatcccagaaaaatctaggaattatagaattaagcaaagtatttaacaaaattttatctagcccaattttatattgagatttaacaaattaaaattagatcttctcttctaggcttttaaaatcatttctaataattccttttaaacaacaatttataatttaaggattttaaacaagaaaaactcttaacaaatataattagatcattaatgatcaaataattactgaactgttctttgtatcatttaggaattgagctccgaaaaatccgagaaaatttcagagagttgacttaatcatggagaatttaataaaaattaaatccatccatgctttatattaaggaaattttatttcccacatttaactttacttgtaagttaatgaacatttaatataacttctaataataatttattaaataatttataaatcctgaaacaaaaatcaggatgtgataaaaggcctacaaaattagtataacacttttctgcgtcaaaaaggattttaacaacattgggctatattgtcgtgagcaagtgttgccgaagcaaaaacaaatgcttaagtccctaaggatcacaacttaaccacgctgatagcaaaactggctgaagtactgtttaggcccaggcccattagtactcccgataccctaaggaaataacaccggaagcaaagcgtcggttcgtcttccccgccaaaactctcgccactttcctcattctctgctacagtgcaaaaccacaccggcggagctagggttcacagattcgctccaatccagccttcaaagctccacgaaaatctcccacgcaaccaccgcatcaatctcccatccattcccagccacatttcgaaccaaatcacatcatccaattcgcatccatgacggaagagagagaaagctttgagagccagtgggcgccatccgacgtaacggaggaaaacctgaaggagatggtggcgcacggtgttcttccggccaaggagatcatcgggtggcgtccagcatacggcaaaatgtttccaacccccgacatacacgaggtggttgtattctcccatttcttttacggcgggttttctcttccaacctcaaacttcttctgaggaattctggatttctatggtattaacctgcatcacctaaatcccaattccatagtccacattgccaacttcatccacgcttgcgaagcttttctagggattaggccgcatttcgctctattccgccgcatcttctttctcaagccccagccaaacaagagcaaaccatgtgttgttgggggagccggttttcaactgagggggaccttgagccaaaaatacttctccatgccattcaagacctcgaacaaaggttggcatgcgaactggttctatgtacaaaaccccgagccagtgcttcccgggtactcttgtctgcctccggtatatcaagatacctggaattcgcttcccattggagatgaggcagcccaagcacttgcattgatggatcgcatgctgaggctcaaagagcaaggtctgcaaggagaacagatcacccagcattttataaaaagccgactagcgccaattaaagagagatcctgcacagcctttgaatttgacggcaagcatgaccccaaccgtgaagatccagattctcttgagtttaaagtcatgaaggagagaatgtacaaaatcttctcgaatgctatcgtggtcagttattcgcacttgctgctagtggtgccatacaacgccttcaaccctcctccaccggtatgtcttatacaactcagctattctcaaagcatacttttatcttctgtaaggtcaactgaaaacttggaatatcatgcacaggaattcgctttgatgaaatctgaccctccaattgctcaacgccgctcaccccgttggaagacaagccaggccagtggagggccaaaaatcaagcctgctgatcaatctgacacttcgaagttgactaatcagtctgactctcggaagaggaaattgatttcaagcgacgatgaaggtgatgatgcggaaaagatgggtaacaaaggggtgactggaaaatagtcaaagcaaaccaatccgaagaagaaaacgtccagtcgtcccatgcaaaaaataaggaagtcatccaggtatgtgtcatctagcaatttcttctgtttcgctagtcactcactattgaagcaaagctgatagcatgtctcaaatctgtagaaaaccatctgacatagatccctctggaaaagaccccacgtcaactgacacagagactggtccttcagcagaaactggactgactgccgaagaccgcccgggtaataatcaaccggcaaccgacaatgtagataccaacaacgagcccccgactggaaaccagtcagccgagactgaagtcagtgctgatcaggagcccccgactggaaaccagtcgggttcagaaccaaatagagatatcccagaagtagaagctcaagctaacaaccctcccaagacggacactggtgctagccctggaactagttctcctgttagggtgcaagaacctgctcgtcctcgactggaaattatcacaggtaaacacgtcctccaaacctgctttgatccgacaaactttcttcaattacttcactattattcatgactatctaagggccaatgattggcaatgaagaagaggtcctccggatacaatcggctgaagattctcgtccaccaatattagtcaagtgatgggatgatgaaatgcatccacagggaattgtaataaataagcaaaaggaagacgaggaagtatgcctgctgaaaaagacactcggccaagccactcgtcttgtaaatgtaggtctccctatatatagcctcaaccatcctgtcggtcactttagatgaacaaagataaatttgtggtgcagagaatccatcttaggaatgaggcgaagaccgcaaccctcgaaaaattagttccccaccttggaacccttgaatccaccagagaccagctacgcgaagctaaggagcttgccaagaaaactgagcatgatctgagagaccggatcgccgagctccaagactccaactttgagctgagcggttcgtcaaaaggtaaatatcgtctctgtctgacttgttccgtgttgctgtctatgtgcaacagaccaatgaaaagcaatacagtgcaagcttccaagatatccgagctggagaagcgaatccaagctccggagaaagacaaggccgaattggcaaaacagagggactcagctctgaaagatgtcgaaggtactggtagtcgaaacctcaaaaaccactctcatcttcatgcccagtccttaatgtgaatttatttgcgcagatcgcaaaatcaaatcccaggctcagttcaacgtcttggttaacaaaattaagaagcttgaaggagccagagatgaagtcgccaatgccgctacgccactcgtccaggcgatgtttttcaataacaacggtctgagttcacttgatgctgtcgaaatcttcgacaagctgagagctactccggatacatattttaagaacatcaaagaagctgggagtatgggaggaggcctagcgctggcgatgaccaagtccttatacccgaaaattgatattgatgctgttgacggctttgcagacgggacaagtgaagaggccgcccttgacctcatcagtgatgcgcaaaaggctgctgacaagatagccgctgatgtagttgagagattccaggacaacaatcttaagccgactgagtctgataattctgatgatgaaagaactgagtctaattgattgtgtattctgatgataatgatgatgatgatggaggcacaatttgtgcaatactgataaatttatgctgtgcttgatgatttaaacttagctccagatttcttaaaagtttttgtcaaaccttattgagcctagaacccgcaaaagtttttttaaaaacttccagtcctcattggctaagccaaaaaatcaaacaaggcaatgataaatcaagtaagcaaattgaattgataaaaatcacactccattattattatagtagcccccgactgataaatcaagggacaacttgatgttaacagtcaaagaggaagatacaaaagtaatgcctaagcataaaaacgacgaagatgttcaatattccaagagttgtcgatatgagtaccgtcttcacgcttgagtcggtaagaacttggccgagtgacttcaaaaattatgaacggtccttcccacaagggagataacttgtgccgatcctgtgtagtttgaatttttctcagaaccaggtcgccgactaaaaaagctcgagatcgaacattgcgattgtaataacggcgcatcccttgtaagtaccgagccgactgaattaaggctgcttcatgggcttcttctagtcggttgagatcatctactcggtattctccgtagcgctcctcgctgaagttacgaaatcgtagagattcaaattccacctcacttggcaacatcgcttctgctccatagactaggaataacggcgactggcccgtagcccgactcagagtggtgcgcagggaccaaagtacgaatgacagctgttctacccacttgccagcatacggatgcagtcggtcgaaaactcgtgcttttattccttgaagtaccataccattagcgcgttcgacttgtccattgctcatggggtgcgctacagaggcatatcaaattttgatgccgaagtcctcacagaaatctttaaatactccgcccgtgaattgagtgtcgttatcagtaatgatccgattgggtaccccaaactggtgcacaatgttgatgaagaaatctctagccttgtctgtcgtgattgtgataaccggtttggcttcaatccacttggaaaacttgtcaacagctacaaagagatgagtataaccaccgactacctttttaaacgggccgaccatgtcgagcccccaaaccgcgaacggccaagacaacgggatggtttgcaactcctgagccggtagatgagtttgtcaggcgaaaaattgacaaccctcacatgttcgcacaattttgtcagcgtcggacacggctgtgggccagaaaaaaccttgccggtaagccttgccaacgatggttcgtgcggtagcgtgattgccacagatgcctgaatgtatatcctttatcaattgtcttccctcctctaaagacacacagcgttgcaggattcctgatggacttttcttgtacagctcggtctcatgtatgacataaagtctgctgcacctggagatcctctcggcttcatctttatcttgagggagttcttgttttgtcaaaaatcttatgaggggctctctccagtcgacttcaatcatgcttatgtcttgagtgtccgtggcctcgattgtttctttccttggtacggatggctcgtagagatgttcaacaaacacgtcggaaggagctgcttctcgttttgaaccaaaattagccagtctatcggttgcctcattattgtgtcgaagaacatgggtgagctcaagtccatcgaatttgtcttccaacttgcgtacctcctgccggtaagcagtcatgttatcatcaaggcaggaccactctttcatgacttgattaataaccgactgagaatctccacaaactatcagacgccgaattcccaaggagattgcaatccttagtccgtgaagaagcgcctcatattccgccacgttgtgaaacgcagaaaaatgtatccacaatacgtagctcagcctctctccagtcggggaaattagaataactcccgctccagtgcctgaaagcctcttcgacccgtcaaaatgcatagtccaatactccatcttctccacgggcatgtcttcttggcactcagtccactcggcgacgaagtcagctaaagcttgagacttgatcgaagttcgcggcttgaaagatatatccaaagacatcaattctaaggtccattttgcgatccgcccatttgcttcgcgattgtgaagtatgtccccgagtggaaacgatgtaaccaccgtaatcgagtgaccttggaagtagtgagataatttcctgacggtaattaaaacaccatataatagcttttgaacctgagggtatcttgtcttggagtcagccaaaacctcgctaacgaagtagattggttgttggaatttttgaacatggccttcttcttcacgctcaacaaccaggactgtgcttacaacctgggaagttgccgacacgtataacaacaacggctcttgcggatgtggtgaagctaagactggtggagtagtgagaagttttttgaagtactcaaaggctttttgtgcttcgggtccccactggaaattgttggttttctttaacagcttgaaaaaaggcatcccccgctcgccgagtcgtgagacgaaccggctgagcaccgccatgcagccagttaacttttgaacgtctttctaggagctcagcggtttcatgttgaggatggcattgattttctccgggttagcttgtatgcctctatgggacaccataaatccaagcagcttccctgacggtactccgaagatgcacttttcaggatttaatttcatcctaaaagcgcggatgcttcaacgttgcggccgatctgagttgaaaaacatctctggatcatgcgttgataagttgctcctgcgttctttaatccaaaaggcatggtgatgtagcagtaggcctcaaagggcgtgatgaatgaagtctttaagcagtcggattcctttagtcggatctgatgatatcccgagtagcaatccaaaaaactgagtagctcgcagctggccgttgagtcaactacctggtcaacgcgaggtaacccaaatggatctttgggacaagacttgttgaggtcggtgtaatcaacacacatgcgccattgccccgtcttcttccgaaccagaactgggttggctagccagtcgggatgaaggacttccttgatgaagcccgctgctaacagcttggtcaattcttccttgatcgcatccttcctatcctgtgcgaaacggcggagtcattgctttattggtttagcgtcatccttaacatgtaaagagtgctcaatcacctctctaggaataccaggcatatcagatggtttccacacaaagatatctttattattttgaagaaaggtgatgagcgcgctttcctatttacaatctaactcagcgcctattacagctgtcttagtaggatcagagggatctagaggaatcttcttggtcttggtgtcgctttccccgctctttggcatcttggtcgcaggcacttctccttcgcttgctgtggacgcagccagttggatttcttctcgggcgagcgtgatctcgcaggtctgggccatctcgcagctttccttgtcacacgtgacggcttgcttgatgtcactccgcagggatatgactcctcgaggaccaggcatcttcatcatcatgtaggtataatgcgggacagccatgaacttggctaacgctgggcgtccgagtatggcgtgatacgctgtctcgaaatcagcgaccttgaaacaaatgttctctgtgcggaagttctcccgagtgccgaaagtaaccggaagaatgatctggccgagtggtgtagtagatagccctgggatgactccgtgaaagggcacattactcggctttaattccgtgcgagggatctgcatgtcgtccagagtcttggcgaaaaggatgttgagtgcactgccaccatcgatgagggatctgcgaagcttgacgttgcgaaccactgggtctagtaccagggggtaccgccccgggtggaccactcggtcaggatgatccgagcggtcaaacttaattgttgtctctgaccaccgaagatattggggcgtgtcgggctgaacagcgttgatctcccgttcggttagcttttgctttctcttggattcataagccaggggtccgccaaagatgtggttgagttccttgcgatggtcttgaaaaccagtcggggcgttgtcttcatcatccttcttctttgacgtgctttgatctccgtcagaggccttgcgtgcattcttggcgtattgttctgcgaactgttgatagacgaagcaatctttggccgcgtgattggagtttggatgatgcggacattgggagttcatgatcttgtcaaaagtgttgacccgtgaatgttgccgggaggatggtgtagtagttgccacaagttcctcgggcttgcgatccttgtgattggtacttccactcccccctgtagtcggcgtatctttcttcggcttccaagtggtgcccgactgcttggacgcggtaatggcatcttcggctttggcgtactcattggctttttcgaacatctgcttgaccgtcctgggaggcttgcgcccgaacttgccgactaggtcatcgtggcgaatgcccttggtgaaggcagcgatgatgacgtcgtcggtgatgtcggagatcttgttgcgttgctcggaaaagcgtctgatgtaatctcgaagggattctctagacttctgaacaacattgtagagatcaaactgtgtactagggcgttcaaagataccctggaagttggcgatgaagtggtcgcgaagttccgcccaagatccgattgtgccacggggtaactcgtgaagccaggatcgggcagagtccgctagggccacaggcaaatagtttgtcatggctttgctgtctcctcctgctgcgtgaattgcgagaccatagacggtgagccaagattccgggttagtggtgccgtcatacttctcgattccagtcggcttgaagccggctggccaatccactcgacgcagttcacttgtgaaggcagcaactccatccacgtcgtcgtcgtagcgatctggtgaatggtggggaacgtatcctcttgccgcgcggcgctggttgataatatcgcgaagatcgacagggcgcctgcgatgtggggagcgaggtcgttcaactcgacgctccctgtgtcgttcaggaggcgagtggacagatcgctcgtcgtgacccctgctcctgcgactagatcccgcgccgacgacactgaggcttggttggtgatagtcttgagatcgaagagggggaactcggctgccagtcggcgtgcggacgcttgcagagttaaccgggaccgagacggcgatcatgatcttggtctggttcaagatgttgacgacgtgattggcttgattgagtgcgtcttccttgaggagggtgtcgaggagggtgatcgttgcaactgcgttctgttgaggggtgcgaaaaaccgccgttccgtcaacgtcttgttgcccgataagttctcgtgctcgtcacccggcatccaaagcgcgctatcgccggtcctcagcctcttttgcagcctattcttgctcttgtgcttggcgctcctcttccagtcggcgtcgttcggcttcctgttgcacgcgttgttcttctgcttcttgggctttacgctgttcttccatctcgttgtcagccatgaagatgccgaagtagagaggcgtgtagttatcttcaaagtcttcgtcgaagtcgtcgaggttgcggtagtcgtagcggcagccgaagtcgttgtactcaatgatctccgttggccgtgagtcgacgccgggggagctgaggtagccatccagttgttccgtcgaaaccgtgctgagaggctggagtatgatgccgacttctctggtgctaagctggatcggggtagaggccggatcccgcctagatctacggggagaagatgcccttgtggtgaagacagcagccaaatcatcggggagtttcatcaggattggcggataggccccatcgtcttgatcgagtcgtgttggagtagattggatctcgttcgagtggtttgaagccgactcggtggagacgatcttggggtagatcttggccgagtttgggataccgaacggggcggagatctggcttcttcccgactggttcgaatccgagtcgaggagagaaatcttgacgaggtcgttggtgatgaagtcgaggctgccgaaccggaacgcctgcctaggagggaagacgaagtcgtcgatgtcggaaacgaaacccatcgcattagtcggcgaagtacttgacactacccctacttggcgcgccaactgtcaaaacaagatttcgacaatactaaagggggtggctatcaaactggaaaagtggatggtttaagagacaaggaattttatacaggttcaggcctttttaatcaagaagtagtaccctactcatgtccggggattgatctgccgagtatattattgatcgtatgatctgggtgaaaaaacgtgcccctagaggcacctggaccctttcttatatagaagaaggggtccgtattacaaaatacagtccatatccctaacggaataggtagttacaaataaaatacaatcgtaaccgactaggatcttgggtattaccttgacatacaagtttagaatttaacccaagtcattttaaagatattctatctatatatagcactccatacccagtcaaactatacatgccgtgtatgtatggggtatccatgatctccacaattcatttgtcaagtaagtacttcaatagtacaattctgatagtgcgagcatagtcgtgaaatacgacattcacaaaaccgatgataactgctcgaaaaccacaggtatcatcagctttattgctccggctcaagctaaaagttcactaaaatccggtcaagtatataaaaactcaagctaaaacttaaattttgcattaaactgtcatctccgagctgttaacatcaaaaccgacaaatccaaatcctcgaatccttatgggaagcccatttcaactcaccttaaacagtcaatgggcccagccatctatcataaagcccaacaaggcccatgaaagcccatctcaactcagcctagggtttttttccactccgcggcgtctcgctgtctctctctcctctatatataagcctccgccgccgcctcctcacctcttccccttcctagcaccgccgccgccgccgccgccgccgccgcccgccgcgccgcctccgtcgccatgggtaagctacaacattccgttcttctctcctcccgctcgcctgcggatctaaccgtgcgtgtgtggtgcagcccggatcaaggtcgacgagctacgggggaagaacaaggcggagctgcaggcccagctcaaggacctcaaggcggagctctccctcctccgcgtcgccaaggtcaccggcggcgcccccaacaagctctccaagatgtacgcgcttcgcgctcgcgctcgcgctcattctctcctctttctgtgtgcccttgtgattgattgaatctctgtggttttgcagcaaggtggtgcgcacgtcgatcgcgcgggtgctgacggtgatctcgcagaagcagagggcggcgctgcgtgaggcgtacaagaagaagagcctcctccccctcgacctccgccccaagaagacccgcgccatccgccgccgcctcaccaagcaccaggtataagatttcataaaaccgtgcacacctactactgatatctaaaactcatgctgatagagattcacatggtgtcatcttccttcaaacttttagcttaacttgggctgttttgttttttttgcatgaaatgtgtacttactaccattgcagtagataacttagttaatgcagtgaattgttctgtactgctacatctgcatgctacaccattttgttaattctattagcaacgccattttgttaactgcgtggggtttcatcattgttggttgcttttaattgttagattgtacatgtaattgtagatttttattatattacttgctataaaattgcttttcttaacaaaattgtgagaaatacaatcagttttgtcagattgtatgcatccctcatcgtcaatcacttcacagcaactactaggaaacagataaaaaaatggggcatcattttttcccatgtagaatgtggaatacatgagccctgggatgaatacatattgctcacgcaatatcaagatatatgtagttactttttttgtttgttttggcagttggtacttggctgtgcttgtctgcatatgatatataggaagatattaagagagaagggtagataaaggacttgtttgctgcattctttgaaaaatgaaggctcacctttttcaattcttatagaaacatgaagtcatttgtcatcctaaacttatgttcaattttctagtgtcttgtaatgaatctagttatgttatacttgcatccgtcttctgacattttccatggttgccatatcacagctttcgctgaagacggagagggaaaagaagcgcgagaagtatttccccatgaggaagtatgccatcaaggcgtaggtcagggaacatgagagaatgttatgtttagcacatcactcagtcaatttatctgccctcgagttccttgaattttgatgttatcatgtatggacatgccttgtggtcaagtacaatgtgacgggggtttgagtacttgcatgctaacattgatatatctaatctcatatcgtcgtcttcggttaacttggttaatacgaattatgtggtgtgctgaactgaatgtggtgcttttgcatggtggttgtcgttatgaaatttgtagagcggttaaacaaactatcagtttggaacagcttgcagggttcaaatagtcagatgaaaggagaaatggtagcaggatgctactatggtacgagcatggcagatcatataatccgtttattatcgaacgcgaagataaactaggagatcattatacatcattattgttcgcaaaaaggaaaccaatgtccaaaatttctatgtgctctacaattgatctcgaatcaaagacgaacagagttagagctattccaataccattataaactacacaagaaacaagtctcttataggtaagggtatctcaacagtaaataatacttcacaaaaaagatgttcattacatgatgattttactactacagctgccgggaagattgccagtgaccgctcaagcctttttacattaccattcctccatcaatagtgaggacctgtatggtgacacgagagtatgagaccttcagaaggtgaaagggtcatcaaagaacacaaagaaacaccaattcgcctagtaccatcgaaaaatcacctgagttggaaaatttcatcgtatatgatattggcatgtggttttagaccctacatgtcattcttatgtacaatgatattttacaactcaagtatcttagtgatggcatttccgaaattttcccaacaaacaaaatgaacatttaatctatgttctcactacctgcccagtgatgtagcttccaccagggctaagtgctaagaactcaaccagatcagcaacttcctctggttcaccatatctccctggcaaaattgtataggagcattagcactatggatggttgacatgttcagatttcttctgataggataaaataaattaaggacgaagtggtcaatttacagggaaaatgtgagcacaaatattgtcttgacaaagtgaacaataagatggattaagcattcgcagacctaagggaatagttatcagatttttcttctcaatctcctccccaagttgggaggtcatatctgatgaaataaatccaggagcaacagcattcacctagatagatatgtagagaaatgtattagcaatttgattaccagatgaaggatttgaaacaataaaatgaaagaaaatgtgctcactgtaatatttctgcttgcaaattccctagcagttgtttttgttaacccaataactgcagccttggcagcagcataattaacttggccaagattgccagtaaggccaacaactgatgctatgttgataactcttccctatattgcaaatttgccgtattgaagttcagtacagaacagcgtgaaaaaaaatataaaaatattaaaaaacaatcaaatatcaatctggtaaagaaatgaactatatggagtacctttttcttcttcatcattacttttgtcgcagcctgcaaaaaaaacatttgcagtatgatgcataaagcattttaagtacaaaatatgagaaaatgtgtgattagtacctgtgtgcaaaggaatacgcccgtaagattaagatcaactacatcttgccactgagatttcttcattctcagcaacaatgtatcccgtgtgattcctgaatatcagaatggtcagggttaaaacttaaaagtaaaataaattgttttttttgtgtaaaaaaaagatataatattccactaggagtacctgcattgtttacaagtacatcaattgtaccccatgtatcaacagcctggatgattaatcgtggtcagaaatttgaagagagaaaaccagtatcacagagtatcacgaatggactatgcttactgctttaatcatagaatccacatcggcttcattagaaacatctcctcggaaggtaattgcctgaccaccaaatccttcaatctgtaaaatacggaaacctcagtatcttcttccatctatttaaggcagaacaacagaacaaaattttcaaaacacatgcaccccggaaacaacattcaattgtattttcctttgattatttatggttttgtgaaatttactctttactttagataagaacataacgcagttttagtttaaattaatgcttcgtggtattctcgtattacaaatcatctacgttatgctgctttaaaaaaaatatgaacaaagtaactagtcaacacaaagctttacctctttgcagacttcttcagcatctgttgaagaccgagcataattcactaagacctgaaaggtaagtagagtttttttttcccctttgattgtaaaacttgtgttatactcagggaaattattctagttcagcataacaactaggcaacagataaatatttgaacccaattttccagatacaatcctctttgtattgttctagatgcacctacatgattcacaatcatgaaacttgaaggtaaataaaaggtaaatttctttcacagggtagcatgcaactaaagttttcatcaattcatctattcagattgtcaataacagtcatttgggatactcctatgatcctattgaatatataaattaaccatttaagtttccagcctgctgtaactcagataagccagttgcagtggctcagataagcatcagcccttttgataaaatttctatagatgtataagcataaatcaattactaagtgttaaccttgcagccggcttttccaaaagccaatgcaatggctttcccaattcccctggaagcacctgtaacaacaacaactggagcctctgactgtgcaatagcatcttgtaccactgcttgttcaacagctgcaacatgagttcttacacctgcaaacggcatagtttaggtgagtaacactttttttttttggttcgcaaaagaagattaactgaaacagtataaatataaatcttaagcattacatattccaaaatacaaaacaacaagataagtttatgctgtctaataacagatatatatagtatatgtgaactaccattaccagttcacatttcccacgcaactccactttaagcaccaaccgaacctaaacgaaattaaattaagctaactgcaatgtagccaagttctacgagaaataggaagttacgattggttaaacatttaaaagcaaatttgtggcatgtcaaaccattcaacttttccttcatattcgtaagagtgaataactagtattgacaagcaaaaaggaagttgtcgaagttggtaaaagataaaaagaacaaaaggtaaaactaaaaataatgtcgtatcatgaacatgtgggcatttggacagtgtttgactcggcaaaatacttcagtgctgtattttaaaattcgaacagatttttgctgactttgaacaaattcccgctaaattcaagcgactaaaatttttcaaccagaggtaatccctgttgggcgtgggaaaatccaaattcgaaaattttgaaccatgatgttgaatggtaatgatcattgagaaacacccgggggtcttccggctagctccacaaggtggtgggctaaacgacctgggttcgaagcctcaccccttctaattactaattatttgatattaggtcattctctaatgttcacatctttttaatggtaatgatcaccaatgatacaaaatataagtttcatcacaagagaaacctagaaaatttcatagaaaaaaaccttacaagaaaacataatcaaaactagtgttgtggaagacggaatgcggatgttggacagagtgggtaccgccaaacgattaatcggaatacggacgattaatcggaatttgacggaaatttaacggttgtgaatatgtaaatattgttatgcatattgtagactcatatattggaaattcactacatatataatatgctacaattaggaaaaggtgaaaaccatgagagctattatacagatatagaaatctgtctagtattagtgcattggaaaaatattttgcatggattatcttatgttcttcagagagaaactttaggcgtgcacatcctagaccaggttgcagcggcatcagatactctagaggaattcacgtactggtatagctagctttatactcctactagagaaaacaacaaatgggatagggtagtcgttgtgggttggttcagccttttgatcaggccaattatgcggccgattagacacaaacgggaagattaatcggcaatgacgagatttttttcgttgtgaaacgattagtgaagaccgttttgcaaaaacgtgacggactaatcactgtcaacgtattaacggccgtataatcggtgcgttttccacaacacaaaaacttaatagaattatcacgaacacacctacattttcagagaattgccaacatagacatagtcatagcactgcttgagtgagtcacagtttgccattatcccatcatgttgatgccacgacgacaagtgggtcatatggtctctgctttcatcatcaataataataaggcgttaaatcaaaacggtcattacctgagactgagagcgagacggcgcggcggcgatccggccggacgctgcgggcggggaagctggccgcaggcgcaggggagcacggagactggaagacggccgccgccgcggctgctttggcggcggtgatggtccccatggatggtcgatcggagcgaggagctagattgtaggtggcgttggggtgggtggtttggtgggagatgtgtggggcgatgggcgggggcgtcgtccgtcgcgggtttgttttgaaggctgcgatggccgatgggtgcttgggcgggcggaggcaacgaggacggggaggaagacggtaggcgggacatgggtagacggtatgccagtttgaactttgaaacttgtcaattttcccaatcttctctctttccttgttattttttcattgcacggatgacacacgcacaccgcaatcagacacacacaatgctcttaacgagacgaagaccagcgataaatttttgacttcactaaatttccattgaaaacgcactcgcacgtgcataatatttatagacaccaagatttaaacctgataagttgtttcctaatagtaggtggagtcgtggactcataattttaccaccctattaatggtgtttcccaatcatctcttctttcaattgcatgaaacatgcagcataatgtacactatactcttatacgtactatctatctatcttcgtactagtatgtttaaatccttagcactaatattaatattatgtttgagttataaacatttaagttttgtgatttagttgataataaacatgtagttttgtaattgctttgttactagatctgtaattttacgatactctaccataaatttgtatatgtaattttgtgatgtatcactttaaatctatagttttgcaatagtttggttaaaatatatgaagttttgtgaaatttgctcaaagtaacattttgaatactgtgttaaaatataaaaataattaggatgttgggtgtacgtgatttaaaccttgaccggtataatcaccctgccacttctgtaacattttcttcaccacttgtttgagactgtcgatagacaagaaacactactacaaaacattaaataggtgtcgccactataggtgtcgatagtgttaaaaccggcatataggcattttcctacctccgcgggttgaaatcgcaaaaaaactgacacctttaagcaattataataaaaaccgacacctattatatattgtgtcggttttttaaaaaaatcagcacctataatatgttataggtgtcggttaattaaaaaaccgacacccaaatcgagccgaggtggctggggtggcaacggcgggcggagccgcatctgggatcggcatcggcgggcggagcagtggcggcggtggctcccgcgacggatccggcgacgtggcggcaacggtgattgtttctatgaaattgttgagggatctgtgatttgctttggatctctcggggtgacgggtctcggggtgaaggggaacgactcaatgttcgagccgatgcattgagcccttttttttttttggattcttgggacctaaaccggcatctttgagtattcacatcagtgccgcctcttttgtgccggttcctgtgtggggttcccaactggcattgatgtggtgttatgtagtagtgaaaagatcctcggtttttgcgtgtacattttttaacgattaaatagtatttttttaaatatatatatatatatatatatatatatatatataaaagagttactttaaaaccatattaattattttaaatttaaaataattaacagttaattaatcatgtgctaataaatcatattgttttcagtaccttctctacatttctcttttcctcctcttaaaacacacctacctgtgactcctctcgtttttcaatcattttgaaacttgcgtagtaggatgtactggtagctgcagattggattgagatcgaatgcaatcacaagaccgtaagttaatcactgcatgtgatctcatccattcattttcctaggtgtagattaagtgttatagcggcatagcgccatctcccatagtagatgcctggtgtttttttttttcatgaacagtgcttaaacgatctcaatcgtttcagtagtctcaatgtgactgtgtcagtagtctcaacgtgactgtttaaattgtagtagtcacactaaagactccaccagaacctgatccctgcagatttgcatttgccaatcgattccacatatatactctcgccgggttgataatacttgtcgttttagataaaagcacggtctaaaaaataactttgaccattattttctattataatatgtataaaagtgttaacactaatttatacatgtagtaatcatatttgaaaaataaatattttaaaaataatttataatcaaagattttaaagtttaacctgatccttgtctaaaagtacaagtattatcttcccggggagatagtaacgattgattgaagccctgagttgctggactgactagttgtttgtgattgaccttgctacgacgacaactccttgtccgtatctcaaattttctcgataggaagctgggtgcgtggtctatctatccacattttcttttacttttttcggttcgtcatttcgattcacacggcatatatgcttaatcactcattcgtcatggcaccaagatctaccaagattccacaaacgtgaatcacaacacttcgtcatggcacccagatctattttatttagctttaaaatatgcatggatttgtgaaaacatatccaaatgagtatgagcgccgctggagcttaattaagggcgtgcacaaggcagtgatagtagacccaagaaattcttttggatttttttttataaaaaggaaaacaccaatgtctgatttgatcgaaattttcaaaatctgaccaaattgtggtccagattacatgaaaaatctgtacgtagaatacagaaatgagcagtccagttactcctatttcatcccttgccacaagccgttgggtgttggtgatgctcttcttcgatcacctacgttacctggatatgtcatggaaggtgcatatccgtgtcaaatacgtgaacggatacgaatacgtatcagatatgctccgatacgtatcctatatgtatccgtatttttctggatttttgaaaaaaaaattaattcaggatactcgacgatacgcctctcaatacaccttggatacgtcccaacgctagtgcatacatcgttcgatccaaatcacatgagaaaaccgacagactctaggtgggagtaggtttcgggttgtattcgtgggatttctagattgctttatggatataacttctagatggtttcttttcatatgcgatgctcggtcagaccacaggtgaaccggtggtcagaccggtagccaagcccggtcagactgcaggtacaacggcgatcagactggcctcgggggagttttgcgcataattcaaattagacttttgtgaagagacaaggtaagttttcaggtaagtctggttctgattttgtgtgtgcatatgtatctattggttctaccagtcgtgtgacttaatgttgtattccaaaatttcttatgattaaccccaacacacaggcctcgacatcttcctctttgtaggtattttggcggcatactctccatatgcgttcaacgttgtgaagatgattgtttttcgaggtaacatcaaaataattttggaatgacataatattaatattgttctactctcttgattattagcttttcgtatgctagtgtttgaggtagtagttttggttaatacaagtagatacatatcaattcatgagaaccttggtgatattgttggcaattgggtgtctttttcaaaagctttgtttccttcttgatttttgtccggggaaaattgaaggttaatttgagagggggggttgctcttggtgttatcaagcaaatctgaaaataacaaaaaaaattaagaaaaggagagctttgtcttatgcattttgtatattcttgtgcatgctagcaatattatgaaggttcataatattttgccatgtattttgtatattcttgtgtatgcattttagtgtttttatgaggcttagatattgcttttaagtgagatggtgcatggcactaattcttttacttgaattaagaaaaaaatgcaatgttgaagctagtacatagtttggatgatgaatgcttatgtatatgattgttgaattgttattcctcaaattgctctttattttctcatcgtgcaagagaataaaataatttctatgagagaaaaaaaatgaatactgaatccttggaaacagtcttgacaacaaggacgtattcgatgtgagcgaaaataatgggtgccgaatcctcaaaaatagtcttgatgacaaggacgtttccagaataaatgagagaaaaaaatgagtaaaacaaaaaggctcaaataaatgttacaaattctattggttgttttgtgctagagctaatattgagaaagatatgtgtaggcttgacttttaaacctatgtgcttgtgaatatattgcattataaattatttgaaattatgaatattgattgttgatttgaacttgatagtaatatctttgattcatgattatactctagtgcatgcctgctatttaattgatgggttcatcttctttctattacaacacataacatgaattgctctatgtatgatgctaagctcttgaacattactaattaaaatgcaaatgcatgatgaaatcattgtcaaagggggagaaatatacaaaatgcatgctttcaaagggggagatttgaatttttttttgttaccaagtcaccggggggatttgaattgttttgcttttaaaaaatagtcgattttgtgctttgtttgccaatatgggaagaaattctttcttttgaaaaaggagagagtttttcttttttgcttttgtgatttttgagttgtttgtgttttttttatttgtttttgtttttcattttttaaaaacaccaaattgcattttgaggattttgccaatgtgttcatcacggagggattgtagagtcatgtaatgatttaatcatggtgatgaacaattgtcaaaagtaattattttataaaaataaggtgaatagtgttttcgtttctcgactttgtgtggccgattagaccgggcaggtgccgccggttagaccggtagtgttggagcgatctgatcgtgttgcccgacggttagaccggcagactctaggtgggaatcaatttcgggttgttctcgtgggatttctagattgcttcatggatatgatttctagttggtttctttttgtatgtgatgctattatgtgctgatgtgagtcaagtagtgcgaacttgtactcggatatggagtttagttgttgttcatgtgcaagtgttgcttgaggccatgggagtatagtcggtgatggatcgggactaggcttgggggaggatcgggaggttgaggtccgggcggtcaaggatatcacgcggaatgttcaatctagagaagaatgcacgtggaggtgaaggtttccatatggaatacatgtggtgttgtgtgcgtatggaaagcggagttgaatttggagggtgtccaaatttgatacaattcgagttagtaaagtttaatttttttttacggacatgttttctagtggattaggatgtcttgtacaaggttggttcgtagctttaggctgcctatattggatataaatagagacggagggtgtggcctcttgggattggtttttgagagagttgagttgagagaaaagttagggtttcgagtttagtcgagattttggtgatgagtgttgttggtgtacttcgtaaacacatattgatgcaataaagttgatctacttttaagtatttcatcgatacgtgctttcctaggtcccgacggtttgactgaagtaatacaggcggtctaaccagcgaggaggcggcggcaggaaggcaatccaatcggcgacaatgcggcagtcagaccagcggcggcactgcagtcagattggagtagatctggcggttagaccgattacgtcgagctctccattgaattcgatggtaacttttatttctgctaaaagtttcggtttttaggtactacatccattcatccacccctctggttggcttagttcttactattcaatcctacatcatggcatttgcttatataaagtgatgatacatatgaccctaaaatttgcacttctatacactaacaatgtcgtctaataatgtatgtcaaatatcggtgatgatataaatagatatagaagatcatacttgcggataccaatgatgatgtttgtaggtaccggtggtgacacctatatgataccgtaacatccattctgatagatataaatacgagtgatgatgcttacccctccgtcctaaaaaaaagaccaatcctatatgtgtcaaggttcatagctaggaattcgttttttttttgacagagtagtatcggataacagatagtacatgtaggtaggagtaatgatacatgcaggtaccaatgaccataagagcatctccagcagctcatccaaatctcatcctccatatgcccatatggatagccatccaaaaaagattcctcactcgtatcctttcctactccagcagatcatctataccatatccaattttttataatatcttttaactaactttacatttctatttttaagggatatattttgaacaactaaattttaacgcggtgctatttatcacgataattttaacagtgataattttaactggtaatttttaattggtatatttgaattgagtgaatcatagcaaaaaaaaaatcatagcaacacaaataaaatgatatgggacactgtaaaatcgttatttgtttgtaaacgttccaaaatcaatatagcagccgcgtgtacagctactactactcttttcttctgctctcctcttgtcttctctactactgctctcctcttctcttccctcagcggacaaccggaggcagcggggtcacgggcgagggtttcgggcggcgaggcgcggcggcggggtcgcgggcggaggagcgacgggcgcgggcggtggcggagcgggcagaggagcgacgggcggcggccgtggggtcgtgggcgcaggcggcggggtcgcgggtggaggagcgatgggcgtgggcggcggccttgcgggcggaggagcgacgggcggcggccgcatggctgcaggcgcgggcggcgggtttgcgggcggaggagtgacgggcgcgggcggcggtgtcgcgacagaggaacggcagccggcggcgagcgggcgggcgggcctccgcctctactccgagcctccgccgccagatccagtaagtctctcctctctacttccatacctccgggcgacgacgaaagggaggttgcgatggaggaaagttgatccggaactccggatgtgggcaggagcgcgggcgatgaggtttggcgtgaggagagagaatcgccatatttggccgaactctccctgatttggtgcatcctctattttttgaggccttgataccgtatctgctggagcgccgttttctcctctcatgcgctatatttcggatggagtaccggatgaaagatctgctggggacgctctaaatgtaggaatcagtaatgattcttgcgaagtactggtaatgatacatgtaaacaccaatgaatatacgatgatacatgtacgtactactgatgatacacgtgaggtaccggtgatgataaatatcaatttatcaacaatgatatctgttagataccaatgatgatatgtgtaaatttttaatgatagtacttcttatcaattatgatcgaccatgactactaagcccgtcctaaaatataataacttttacctataaatatattattgtttaaatttagagctaaaactgctcatattttgggatagatggagtacgtaatatctcaaggtacatgaggattatatatccaagcgtaggagtgaacgctaaaaggaaaaatgaacaaggaaataaatgttagggaaaagaaatttcagagatgagatgaaaaaactctaaatctctactattataaaaattaaagaggtttttgccggtactttggtacgtcatccgtgtatgagtcggttttaaattcgtttgcctttataaatacaaattcatatttgagttgattttaagttcgtttgcttttgtaaatatataaggaatcgtaaaagaaatctgtttaaaaaactcgcaggttaacttgagatgattggactctaattacaactcataattttctaacaaaatatatatccaaacgaatttaacacaatgtgtttcatcttaactaaaccatatatctctatctcttctttatctctatctctactattataaaaatttaaggtgtttttatcgagattttagtaggtcacccgtgtttaaataggttttaatttaatgtttccatctgagcgaattaattgggccgccttaaaaagaaaacgtgtccgattcctcgtaagaactaagaaaggtgaaaaaccatccgtaaaaaaaattaaaaaagagtgaaaaagtcccccagaagaaaagtctgattcccccagagcggcgaaaaaaagttcgttccttcaaaaaaacaaaaaataaagatttgttttgtatgcaacaataaaaaaggcagtccaccagtccgtgaaaaaaatccatccaaaataataaaaggcaaaaaaaaacaaaaaaatgcttcaaaagagaacaaaatgtttccgtcgtaacctttacctattataaaaattgaagataattttatactcatcgaattttcgtccgccgtcccttcattccaacaagccgtcttgttccgattcatatatgtttttagcattttgaccatattcacgtttcctttttttttttctctgcacatccaatacgtttttgcacatatgggcctaaaattgtaaaagggcccaacgtctatcacaatctgtcttcctatttcgagctgtctcagtgaaaaatattgcctatcttctaagcatatgttacatactatttattacagatttgtttgtgttatttcaataattttgtacacatgcaaatgaaaaacatactaatttttgtatgggtggcttgcatgcatgtccgtttattttgtgaaggattcatctacacatgattctttttaacataattttttcaacatatgattccgttcggccatttaggattaagtgatttattattaaaactgaagttgtttccgctgtgaagttgtttccgctgatagttttagtatgttgtccgtatttaagttggttttaaaattcgtttgcttttaaaaatacaagggtttcgaattggatatcatatcaaaataaaaatcccatatactttttagacaaaaaaaaatctaacaataatacaattaaaatagtcttcacccgttgcaacgcacggatattttttctatttaaattaaaaaaaaatagaaataaacaaaattagaaccagaacatggtccacattggacattggacattgggccttgctgcttggctggtctaatcaagccggtagtggcaggtcaccacatggggtcgtctggcgggttgtgcacgatgtgtctgcatggctgaaaaaattgccgcatctgcaactgcaactgctacaataatcgtcagttcccagatccatggacacctccactctcctcatcgctctcacgctcgtcctcctcctgctgctgctgaccgcacgacgccggcgaagcgggaggctgcggctgcggctgccgccggagccaccgggcctcccgctcgtcggccacctgcacctcttcaggaagccgctccaccgcaccctggcgcgcctcgccgcccgccacggcgccgtgttccgcctccgcctgggatcccgccgcgtcgccgtcgtcgtgtcgtccgcgcccgccgccgaggagtgcctcggcgcgcacgacgtcgcgttcgccggccgcccccgcctgccgtcggccgggatcctgtcctacggctggtccaccatgggcaccgccgcctacgggccctactggcgccacgtccgccgcgtcgccgtcgccgagatcctctccgcgcaccgggtgcggcagttcgccggcgcccacgcccgcgaggcgcgcgccacggcgcgacgcctctgccgcgcggcgtcgcgccagcgccacggcgccggggcggctgcagggcgcgtgcgggtggagctcaagtcgcggctgttcgagctgctcatgaacaccatgatggccatgatctgcgacaagacctactacggcgcgtaagatcaccatgatgcatgactcgtaagttcttttggttaaccaccatggatctggtataactctgtgcagcgacgacgacggcgaggtgagcgaggaggcgaggtggttcagggagatggtggaggagacgatggcgctgagcggggcgtcgacggtgtgggacttcctgccggcggcgctgcggtgggtggacgtgggaggggtggggcggcggctgtggcggctgcgcgagagccggacgaggttcctgcaggggctgatcgacgaccagaggaaggagatggagcacgacggcgacgggcgtgagctgccggcggcggcggcgaggccgaggagcatgatcggcgtgctgctgtcggtgcagaggcaggaccccgaggagtgccccgaccagctcatcagctccttgtgcatagtgagtacaaaaatgctttggtcatgcttgcgcgtgttggtgcggagtactacgagtgaaatgtcgcttccggggatggggctcacaagtttttttcagcatgacgtgacgccgctgatgccttgttgatggtagggctgtccacgtggcgccctcgatccagctcgtcagcaagttcaccaccccacacaccgcaaaccccccccccccccccaaccccgaattttttttgaaaataatacgattctaatggaaaatcgcacaaatatagatcggtcggacgaaattacaagtttaatacactgtcgaacaaccgtggtttgacagggaacctgtcgaacttacctcatgaactgttgcagtttgacgggttagtggtcaaaaaaaaaaagtacgtgctacagtactcggtagggacctatcgaacaagggaacaggtagtgttcgataggtgtgatgctacagtgtttttcctttcataaaaattattttatcacctgtcgaactgtggttattcgataggtgccatgtcgaaccacggttgttcgataggatgctaaacttgcgattttgtctgactgatatatatttgtgcgattttccattaaaatcgtattattttcaaaaaaattccccccaaccccacccccataaaaaatgatattattttaaccgatttttttaatttggcggtatttgttcacatttcaccaaattttgttaaaaaaataattttggaatattgtcaccttcgatacaaatggagaaaaaaacgaaatattaaaccctagttctaggtccggcctatttccgcattggagctattaaaactcaattcatcccttaaaaaagatatctcctcataaaaaaaattaataagatagatcaaaatgtgatatgtcattttataaacatgcaaattcaaatttaacttatacaaatagaaacaaaaataacaaatttaactattaatagaacatgtaattcacggtcaaatttgtcatttttgttttgaattgtataagcctaattttaactcgcatgtttgcgaaaagatatatcacatattgatccatcttgataattttttaaaattttttataactttttaaacgccatgcacaaaacaaggggatgttgtctcaagggaaaaaaaatccacttccctattaagcaggctcaatttgagctcatgcagtcgagctgggcagtaagtagtatatagtatataagtgtataacatatattttaagaatgcttttcataaaattaattatttttctaatcatatcaataaaaaaatggtacaaacacaaactgaatcattatgtacatatatacttcctccgtttctaaatatttgacaccgttgactttttagcacatgtttaactgttcgtcttattaaaaaaaattttgtgaaatatgtaaaactatatgtatacataaattatatttaacaatgaatcaaatgataggaaaaaaattaataattaattattttttgaataagacgtatggtcaaacatatttaaaaaagtcaatggtgttaaatatttagaaacggagggagtactaatacatattttacctattagtttaattaacaaataaacaagctaaataaatagcgtaagtcatataaagttaagcttgtttgaagttttagctgagcccgaactgggcctgaatgagctgagctcaagtggctcacgagcctagagtttctcttttgacagccttaatttttagcatcgctaacacataaatagagggattgtttttttattttctgtggataattgagcagtgagttttttacctttagcaatctactgtaaaactttcaacaataccactcaaactttcagctcgaactttctaaacttttctagtaaaaattttgaatttccatgggaaccctaatttccaactcatgaattcaaacttttatatcgtttttaatggtagaagtctatttcacaccctaagctttagagaaagtctaaaaccaccacacacttcaaaccagggttggatccagtgtggatgtagggggactcgagttcctcctaccccggggagagaaatgagagtagggggttggaggagctaggaagaaggcaatgagcccttcctctggcccaaagctagatccacccaaaacagaacactacacatcccatcaactattcaaatagtttattttagatctctcaacataacctcggacagttttagtcacctctcgcttacgtggtctcctagtcattaagataaaagatatcccataagatccacatgtcatcctttatcaagttctttctccttccctctcccacgaccctcttcctctctcccatcccattatcctctgtagccgagtgaaggagcaggcgaggctatcagtgaaagaggcatgaggccggctcagtgtgagagagggtggcaggaggaggttgactgcgcatgtggctaacgccgagatcacccgcaccagtcgccgctcgttgtgttcgtctaccaatcagacttgcaaatggacttgtgatagggttcttctcttcacgagcttgtactgatgcatcacacaaacaattattgttatttaggaaaactctcagaaattttaaagaaaacattttgaattttgaacacatcttttttcctgactttgaataggtcttttttgctatatttgacaatactttctttggcccgaagaacatcatattgggacccacaacccacgtgtagacacaaactaaaattcacaaattttgaaccaaaattgtgaaccctactttttttttgcggggaaattgtgaaccctacttaggaatgagatttatgtgaacccacaatccatgttttgtttacatataattatactttcccctttttttattttctcaagagttcgcttgaagccggaacgggtacctcaaccgatacaattgagtgggcaatgtctctgctactaaacaatcccgatgtgatgagaaaagctcgtgatgaaatcgatgcattcatcgggcagccagtacgattactagaggcagatgacctcccgaagctacaataccttcgatgcatcatcatggagacgcttcgcctatacccaccggcgccacttcttgtccctcatgaatcatcctctgattgcactgttgctggtttccatattccacgggggacaatgcttcttgtgaacacatttgatattcacagggatcctcatatatgggatgaaccaacaagcttcatcccagaaaggtactacatatggattcttccaaaaattttatactattgcatgaatgtccatgttatataaagtgtaattacgtacatttatgtttctacagatttgaggatgggcgaagtgaaggaaagatggcaatcccatttggcatggggagacgcaaatgccctgcagagaacttgggcatgcaaatggtaggccttggccttgggacaatgattcagtgctttgagtgggaaagagttggagaggagctggtggacatgactgaaggatctggccttaccatgcccaagaaggtgcctttggaggccttctatcaacctcgtgcttcagtgatgcatcttctttcttaggctttgttagttatagcgcaatatcgaaatgtgttgtgatcgttgatccaactggcatgataaggtattgcttcacaaatgataggattgtttttgttacaaacaagaatgaaagtaagtccatctcttcgtctcaaaagccataaataagaacactcttgtggtggactactcataagaacataagaacagagaacaaactttcaaaaacatgtactctctttgtttcatattataagtcatttgacttttttcctagtcaagtttaaccaagtctatagaaaaatatataagtattttcaacacaaaacaaatatattatcaaaatatattcaatgataaattttttgaaactagctcggtattttaaatattgctaaattgttctataaactttgtcaaacttaactaggaaaaaagccaaacaattaataatatgaaatggagggagtaggaataataaatgaaagtttcaaagattttatcatgcaaaaaacgtgttgcatttgtgattggagagagtactgaatcacaatgcaagctgccctgtaattaactaagtaataaaacaaaaaaaatttgttatggcacacattgtgcacgacaccttttgattagcgaagaaaacaacaactctgctatacatccgacggacgtgtacgaccagcgtacgactcaacggcgaaatacacggtgtaaacccaattgaattagcgatcgttgcagaagttacggacggcagacggccaatgacgtagccgtacgcttggccgacgtagccgtacgctggtcgtacgcgtcggttggacgtatagcattttcgagaaaaccaagacacacgctttggcacttgcacaattgcaattgggcaattgggcgtcccgtgttatgtttgacgaattagtagtttggtgatccaacttgctagtaccacttgattatacttgagatttccagaagcctgcatttcagcaaagcgatatacaccagtggcggaagcatatatatgtacactgtcactgacatgctcgtcgagttcacctcgccgccatggacgccctcctcattgccctcttcctccttctgctgatcgcgcttatggagaccgcccgagtacgacgaagcgggacgcagcgtcgcgccgggaacgtgccgccgccgccgccggagcccgcgggcctcccgctcgtcggccacctgcacctcttcaggaagccgctccaccgcaccctggcgcgcctcgccgcgcgccacggcggcgccgtgttcggcctccgcctcgggtcccgccgcgtcgccgtcgtgtcctcggcgcccgccgcggaggagtgcctcggcgcgcacgacgtcgcgttcgctgaccggccgcggctgccgtcgggcaggatcctgtcgtacgactggtccaccatgggcaccgccagctacgggccctactggcgccacgtccgccgcgtcgccgtcaccgagatcctgtccgcgcgacgggtgcagcacttcgccgacgtccatgtccgggaggcgcgcgccatggcgcgccaccttcaccgcgcggcggtccgccatggcgtcggcggggcggcgcgcgtacgagtggagctcaagtcgcggctgttcgagctgctcatgaacaccatgatggccatgatctgcgacaagacgtactacggcgagtaagctaaagatcgatcggcgatcgccatgatcaccatggtcaccatggctatcttattctacctgtcacttatttgtaagccttgtgtagcgacgacgacggcaaggtgagcaaggaggcgaggtggttcagggagatggtggaggagacgatggcgctgagcggcgcgtcgacggtgtgggacttcctgccggcggcgctccggtgggtggacgtgggaggggtggggcggcggctgtggcggctgcgcgagagccggacgaggttcctgcaggggctgatcaacgacgagaggaaggagatggagcaggagcagggcggcgaccgtgcgcagccggcggcgaggcggcggaccatgatcggcgtgctcctctcggtgcagaggcaggaccccgacgcgtgccccgaccagctcatccgctcattgtgcatcgtaattgtttttctacatatatattcacatgccaaattatatgtttcacaaaagggtcgggatcaaaattttgcaacatgtgttcacattgtataatttgtaccttatatatatattgttatttcaaatatgtatggtataattttgaaaacttatactattaattttaaatcttacactataatctttctagtacatagtaactaggtcaagaggactgattatgtacttaaatctttgaaaaaaataccggccaaattaagacatacaagtagataagaaaagaaacaaaagttaataaggaagagatataaatagagagttactccctccgttcaaaaaaaaccaacctaggaggagatccctactaatacaatgaatctagacagccctttgtctagattcgtagtaaatagaagaggacacatggttggctttttttttctttggatggagggagtaccaatcatatagtggaaaaaaagtgattgcaatcaaacgagtgtatgatgtcacgtgagctgctaatacacacacaagcacacatagattacgtacgcccctctccactcccataccaccgcatacacaccacccatacacgtgtgcacgccgcgctcgccaccttcttcccctcgtatctactccctccatttcataatccatttcatattataagtcgtttggatttttttttctaagtcagagtttgattaaagcttacaaaaaatagcaatatttctaatataaaataaacattttatcaaaatatactcaatattctatttaatgaaattaatttgatattgtagatgttgctattttttttaaaaaaataatcaaatctaaagaagtttaactaaggaaaaaaaatcaaagatacttgtaatatgaaatagatggagtaaataaactatgatctactaaaccatttgtatgacttgtattggcgcttctaataaagaaaatctagaaatgaaaaaaaataattcaaacttcagtttccacttaaatcattgaacggatcattgaaatttatctcaaaagggggttgcaaagccacatccctttaatttctcccctccttgagcacctagacaagcagcacccatgcataaaccatgatttgcatgatgggttttaaacaaaccattacttttgaattttgcataagtatccagtttttaatccatttgcataattgtgttcattatgattaaattaatagttcaagacccatatcgaaatagatggacaattgtgaaaaaagtaaacaatataaattatatcatcacatatcattccacaaacacatatatataactaaattgcatctacaatattagaagaaaactccaattgtatataatattccccaaaacatacttccttcattctaaaatagtgatatatcaaaatgataatgttagatttatatgaaaaatattcccatgcatcttatttttaatctttttatgaaaaatatttccatgataaatatatcaaaatgataatattgtcatgttttttatttctccagagttcccttgaagccggaacagatacttcagctgatacaattgagtgggcaatgtctctcctactaaacaacccgaatgtgatgagaaaagctcgtgacgaaattgatgcattcataggacaaccagtaggctactagaggcgagtgacctcacaaaactacaatacctccagtgcattatcatggagacactccgcttatacccgccagcgccacttcttgtgcctcatgaagcgtctactgattgttcaattgctggttttcatattacccgtgggacaatgcttcttgtaaacacatttgccattcacagagatcctcaagtatggaatgaaccaacaagcttcatccctgaaaggtatcggtatcaatttctttcaaaaatgctatatatatgtacgggcgtattaaattatagcatattatgtttctatagatttgagaatggaagaagtgaagggaagatggcaatcccatttggcatggggaggtgcaaatgccctgcagagaacttgggcatgcaaatggtaggtcttgcccttgggacaatgattcagtgctttgagtgggaaagagttggagaggagctagtagacatgaccgagggatctggtcttaccatgcccaaggaggtgcctctgcaagccttctatcaacctcgtgcgtcactgatgcatctcctttattagctttaagagtaaattacattgacggttcttaaactggtaagcaggtttcatctaggtccacgaacttgcaaagtgtgtattgaagtctctaaacttggtttattgtatcattccggtctaaagtctcatttgatcgtgatcttgcctacatggcatgacatgtagacaacgacatggcacattattactattatttctttttttcctcccttcttcctctttcatttttctcttcttcggcctcttcgacgcgggggagctcgaggtggctcttgtggaggaagaagataaaagaatatgaggaaaaagaaaaggggaaatgaaaaaaaaacatcatgtcatcgtccacgtggcatgccatgtagataagaccacgatcaaacaacgctttggaccaggatgatacaataaactaagtttagggacctcgatgtgtgttttacaagttcgtgtacctaaatgaaacctcatgacaaatttaagtaccgctagtgcattttactctagctttaattaattacacaatactatatcaaacttttggatagttgatcgaattggcatgataaggtatcactttagaaatcatggaattgtttttgttaaaaaaatgaaaataagtgcatctcttcatctcaaaagccatatgtaagaacacttggtggactactaaggctgtgttcggatgccccttttcccaacccctctccctcgtttttcacgcgcatgctttttctaaatggtgtgtttttttgcaaaaagtttatatacgaaagttgcttaaaaaatcaaattaatccattttttaaaaaaaacttaattaatcacgtgctaataaaccgctctgttttccatgatcacattccagatggtaacttgttctagcgaacacagcctaagtaagaagagagagcaaactttcaaacatgatagtaataaatagtatgtgatgttggaaggattatatagcctaataaataatatggagggagaagatccgcggaatttggtggcattccatctcgaacttttttttcttaggggctgtttagttccaaaaacatcacatcgaatttttggacacatgtatgaaacattaaatatagataaaaagaaaaactaattgcacagtttgcatgtaaaccgcgagacagatcatttgagcctaattagtccacgattagccataaatgctatagtaacacacacgtgctaatgatgaattaattaggctcaaaagattcgtttcgcggtttccaggcgagttatgaaattagttttttcattcatgttcgaaaaccccttcagacatccggtcaaacgtttgatgtgacacccaaaattttcatttcaccaactaaacatgcccttagtcctttgtgactgatgtacgaggcctgttgttatcggactctgggctcagcttgtggttcttggcccaatcccttttactttcttatccatgtaattcactactccaaatgaatgaaaacggcagcccaccagccataaattaaaagaaaaattatatatcatgacactgaaacttgacagaataacagggatatccatgctgaattgttcaggtgtttcttttctctgtttcttcagtgcttgactatatttggctaagagtagctagtaggcaaaaaaacacacgagatccattatggactacttggtcggacttaaacacacagtatgtacttatcctatctacgttttaaaatgttttagattagacacatggaaaacagtatctgtatgtttgtctcaaaaagtaatattataattttattgggctctgtaaaaattttgtaataaactactccaaagttaagtcactgcaccttaaagaccatatccatgccaaaaacggcgtgtcttgggatagccatatccatatagcactccatgatctgaaagatgctctaagcagctactactcctatcaacctttgaatttaaggacaaataacgtttgctcaataccttcacagaacagccaacattatgccaaataatacacccaacattattgattcagtaggcctactgaaccaattttataccccaaaaaaatcgcatatcatactccaactagcaaacagccagttaaggcaccgaagcaagcaaaatgccatcactatatcagtcatagaatgcccttgcacagcaacaaatttaatcacatgtgtctaaaaaaaaagaaataattaatcacttggggacaacgtgtcaccgcctccaccggacaagatgtgtccttggctagccctatcgacagtgatgaggtgagccggtgtctggacaccggagagccccgcacggctcgcccaccgccggcgacgtcagccgctcgtcgccgccgcccaaaccggcgcggcacatgcacatgccgccggatgacttcatttattttttacgccattgcagcagtataaactcatgcacccaccctgcgagcaaacgaagcacacaccgcagtgcatgcactccaaccatatcgatcccgcgcgcccgatcagctaggtcatggccgtcgacgcgatgttcggcagcgtcgccgtcgcgctgctggcggtggtggtggctgctgcggcgctgcggcggtggaggcggcggcggcggcggggaggcgggaggccgctgccggggcccgtggcgctgccggtggtggggcacctgcacctgttccggaggccgctgcaccgcaccctggcgcgcctcgcggcgcgccacggcgccgccgtgatgggcctgcgcttcgggtcccgccgcgtcgccgtcgtgtcgtcggcgcccgccgccgaggagtgcctcggcccgcacgacctcgcgttcgccaaccggccgcggctgccgtcgggggagatcctggcgtacgagtggtccaccatggggacggccagctacgggccctactggcgccacatccgccgcatcgccgtcaccgagctgctgtccgcgcaccgggtgcagcacttcgccgacgtcaacgtccgcgaggtgcgcgccctggcgcgccgcctctacaggcgggccgccgccgcggccgccgcgggggcgcgcacgcgtgtggagctcaagtcgcggctgttcgagctgctcatgaacaccatgatgtccatgatctgcgagaggaccttctacggcgcgtaagatcgggcaagattaggagtgattaatcatgacaccatgcgtgacgcattcgtaacctttgttttatgtagcgacgacgacgaggtgagcgaggaggcgcggtggttcaggtcggtggtgaaggagacgatggagctgagcggcgcgtcgacggtgtgggacttcctaccagcgccggcgcgctggctggacgccggcaggatgacgcggcggatgcgggagctgtccgacagccggacgaggttcttgcagaggctgatcgacgaccagaggaaggacatggacgccgactccgacgatcacgcgccggcgaagcggcggaccatgatcggcgtcctcctctccctgcagagaaaggaccccgactcgtgccccgaccagctcatccgctccctctgcatcgtgagtaccggccgccgccgccgccgccgcgcgtcatccccggacgaacaccttgctttaactacttcgtctctctctccggccagggctccctgcaagccgggacggacacgtcggcggcgaccgtggagtgggcgatgtcgctgctgctgaacaaccccggcgcgatggcgagggctcgcggcgagatcgacgcgtgcgtggggcagccggcggcgcggctactggaggcggccgacctccccaagctgcactacctccggtgcgtcgtgatggagacgctccggctgtacccgccggtgccgctgctggcgccgcacgagtcgtccgccgactgcgtcgtcgccgggttccacgtcccccaggggacgatgctgctggtgaacacgttcgccattcacagggatccccaggtttgggatgaaccagaagccttcatcccagataggtactgtactatttccccctccgataatactcgttggttttttttaaaaataacataatctaaaaacaaatttaatcactattttctattctaatatatatagaaaatataaagaaatttatggtttttattgaagtaggatatctatatttctaagacaatactttagaaattatttatatttaaaaattttaaagtttgatattaatctatatatatatatatatatatcacatataaatgttcttttcaagtttcatcatgttctttacatttactaaaattcattcacaacttgttatgaactactaagaatatatcttaacaggtttgcggatggaaaaaacgaagggaagatggtgatcccgtttggtatggggagacggcggtgcccaggagagaatttggggatgcaaatggtaggacttgcccttgggacattgatccagtgttttgattgggaaagggttggggaagagctggttgacatgagggagtgctctggccttacaatgccaaaggagttgcctctcgaggccctctatcaacctcgagcttccatggttgatcttcttacgaagatttagtcagcaccataaaaaataatttgttgttcaacttttgtaatgtaaggaataatcgggcaagtgcggtttcaaagataattgggctgttcatcttctttaaatttccaagattcacctctaccaattgtggctttgtcaactagaaaattctggcaagtacttaagtggatcctattatcgtggctggctggctgcatacagtatggataatctgtgttataagggggatggggtaatccgaatatgtcctgaacttatctaaatctgtcaagcacgttgaattattaaactgagatcgaatcactacagctcgcctcccttcctaggcttgagaaccttcctaagctcttcggtgttgcgccgatgacatcaacctttggtcgcacagatgcttggactgtaatgacaagcaagtgagcaacagcttgtcaactgggcaaacgaactctatgtaaagatggaaccccggctggagtttactataatattaagtaaaaataatatgtaagattgcttaaacaacataagtttacacaaacataaaaacataagtttatatcattcgatgtgatttaaatttaaatagtatgtaagatgatgattcaaatagaaaagtaagcagtggcggagctaggatttcaaagttgggtattcccgtctaagcgctgagccgttgcccgtccctgcctctcgcggccgccggccacccaaccgacctgaccgccttagcttggcggagtgtcgggcgctgcccgccgtggcaatggcctccccctccacggtagcacggtctagctcccgccgccgattgctgtctcgccgcgccgccacctagggtttgcaaatggggagtggcgcgagggagccgagctagggagggatgggtcatggagggagagcgagagggggctgtctggaaaagtggtggctaagtgggtcaattgatgtctgatgggtcatgatggagtgggtcgggttggttggaggcatcgcaagagactagttgggctgtgtttggataaaagagttgaggatttaggtgtacaaatatgtgtacatgtgtatatattagaagtatacttattttttgataaaaagtgttgggtattcccgggaatcatggtggctccgccaccgaaagtaagatgatgtggttttatgaaagaacaaaagaagaaagataatttagaccatatatctaagggctaaaaaattgagatgatatggtttaatgagagaaaaaaaagataattcgaaccatagattaatcatctaaagactaaaaataattaatgtgatataacttaatgagagaaaaaaaatagcataaactaagtgagaatgaactatataggtatataagatagcgaggacgctcagcaaccttctggtgccaaggagtgatgttgcatacacgaagaagaaagcagatcacaacatatgctgagaagcaagctacaactgaacctttgattgaacagcaacagctagcatcaaatagatgcatattagtattattattcagtatgtagaagtacgattgacactaatatagacatgagaagttgctgctactagatagatgcatggcttttgttcatctttcccttttgttcagactctttggagttttagtaagagcaattttctgtagctgaaaggctacgtgataatggtatgcttcgtcaggctgttcttggctaaacctcgaggattcttttttcgaggaaagaggatttttttaatcgctctactttctacatgccgaataaattttctggatgaaagccaccaatttggagcgcttgctcatgagagaatgtagcattgttggtatttggtcacatataaattaatctgtaagcgcacggataccactataccaccactataagtatgccaacggtatcgaatcacaggatatgtatgtgtgtatatttaagaaataattcaaccaaagacaacaatgaatagtaagcttaggataaagaggattcatatgaattaattaactctaacaggagttaatcctatcgaatgcttcgggtaacggctctcccttggtctaccaagacgagtccgccatgtagctctatgatatacctaaacgtggagagatacaagggactgacagagctatcaccatctaccgcctacctcactttctatagagcacacaataaacgaaggtaacctttaacctagacactacgtatacgttattaattaattactactctagcctcgggcaaaaatcttcttccttatctagagtctttgttctagagcactcagtataaactaagcggcgaaaccacaacgatgagaatatatctgacttaagtaagtaaactaaatactaaaatgatatcacaaataacttatatcgaagaaacattctcgagatacaagattggagagaggaccaacaactctggcgctccttcagaactatcccgaatgtaggccaacatctctagaacatcccagagagaaagccgccattcgggcactccttccgaagcttcccctcactctcttcctatattagaactctactatagagtagactaaatgtgtaagtcagttgtacttcacttgttgtgccatttgagatttagatgaacacatccttttatagggcagttatggtggttgtggacatcggtttcacccacaaccgtcattgagagtgaacattagccctccacatggaagcagatggtgaggggcgccaatgacagtttggccgaactaggagtttgggcgacccttggattcaccgtcttcaccaatgcatggcccagatgaagtcttgtagtcggtgggaaactccatgtggaggtgggaatgagcggccgtaaaggtggttcgggaagctgcctggtgggtccttgcggcagtgcacggtgattagcccttgaatatgtcagttatgcactgatttgtgggccctccaatatgtatactcgcgtcctattatacggaggtgtattccatcgcaaggtgggtaattttcatccatatttcacctgcatacaaatattcaccaagacttgtggaaatggttagtaataataactacctctaagtttgtcattttattgtattctttcattgtttttatttaggaattgatagtcgaatttgatatttaaggaccatcaataagctctaaggatgagcggatagcatcggttacagaatgtacttttccctatcttacccctatgaaatcaatgaccagattcgatcggtacctggtacctcgtggtaccttctttaggattgtaaaaattcatctacattaaaaggagaggcagccaccatcggttgggctctgggaggccaccactagggccaaagactaggtgggggaggtgaagaggtgagccctgcctcgactagggaaatactcccccatcccaaaatataagtatttttggatttttgacacagtctttaagatgctactttgatcaacaatatctataaaataagatattgtaaataaaaaaagttacatattatgatagtttgtttaatgttaaagctagtaacatcaatttttcatgattaagttttttttatttttttactattgatagtcaaagttaaaaatgtttgacttgacgccgctagggagaacgtcgttttgctgcattggacctagcgtcctctcaatttgacaccaaaaagcatgcatgcaccccactattcaggtgaaatcttcgggagcaaacataccgtgggcctgttcggtatgctggctacggctgtggctgtgactatagcactgttgatgtcgacaagtaacatcatactaataatatcactactcaaatactcgttccatcccataaaaaacaatctaataccggatgtgatatatcctaatattacgaatttagatataataaatattaatagtattatgatgtgtcacatcagtattagttggtttttatgggacataaagagtactccatccgtcccaaaatataataagttttagagttgaaaacggttactaagaaagtagatagaagtgagtggttgagggttgcgattggatgagtatgggaggtaggtggaaaaagtgaatggtggagggttatgattggttaggaagagaatgttggtgaagaagttgctatattttatgataaattctgaaggctaaaaattattatattttaggacggagggagtatactagtagcagcttccatttttccatcgggaaaaagctagttagcttacgcaccgagtgacatataccacggcatcagtcgcagtctgctacttctttctctgctccgcaacaaaaatttctagtggcgatgtgttaggggatgtgatgtctgactattgttctatacaccctgctagcgtacgtgtaatcatagcagcccgctgtttccataacaattaaatagatactatattaaaagaaattggtaatgatgatataagtatgtaaaaaaacatacaagacgatcgatacgactagagagaaaaacaaataatcgtgcaacgaatactacatatgcagttcaaataaaaaatattatatttatatctagtgctgttcagattaatgccattttaaatcatatatcattttttttaaaatgtcaaatttgtgcaccatttagtttttttttaccaaactatgctaaatacataagaaatcctgctaaaacttggtaatattgttaaattgtcaaaattttgacaccgccaaaatttaaaatttggtaagatttaaattaactataatctaaacataccatttatatagaatttggaattacaagttggcttatatcaattttaatccatcttgttaaattttataaaaaaaataataataagttactccctccatttcagattataagacgttttaactttggttaaagtcaaactgcttaaagtttaactaaatttatagaaaaaaaatattttcaacccaacacaaatttattataaaaatatattcaattattgatttaataaaactaatttgatattataaatattattatatttgtgtataaatatctactgaaggagtacttggtagaccgcatgcggtactttctggtataatgaatgcacattggtccggcagctagcgatcgagctgtgctagtgctaccgctactaggaggcgactctgcgccagctgtcatggtcgacgccatgtccggcggcgtcctcgtcgcgctcatggtgttgctgctggtggctgcgcctgcgctgctctcgcggctggagcggcgccggcggccgccgccggggcccgtggcgctgccggtcgtgggacacctgcacctcctgcggaggccgctgcaccgcaccctggcgcggctcgcggctcgccatggcgccgccgccgtgatgggcctgcggttcgggtcccgccgcgtcgccgtcgtgtcgtcggcgccggctgccgaggagtgcctcggcccgcacgacctcgcgttcgccgacaagccgcggctgccgtccggggagatcctgtcgtacgagtggtccaccatgggcaccgccagctacggtccgtactggcgccacatccgccgcatcaccgtcaccgagctgctctccgcgcaccgggtgcagcacttcgccggcgtcaacgcccgcgaggtgcgcgccatggcgcgccgtctctaccggcgggcggccgccgccgccgcctccgcgggtggagctcaagtcgcggctgttcgagctgttcatgaacatcatgatggccatgatctgcgacaggaccttctacggcgacggcgacgacgaggtgagcgaggaggcgcggtggttcaggtcggtggtgaaggagacgatggagctgagcggcgcgtcgacggcgtgggacttcctgccggcggcggcgcgctggctgttcgcgcgcaggttgacgcggcggatgcgggagctgtcagacagccggacgaggttctaccagcggctgatcaccgaccacaggacgaaggagaagacggacgacgacaacgccgccgccggcgaccactctccggcgccgaggcggcgaaccatgatcggcgtgctcctctccctgcagagcaaggaccccgacgcgtgccccgaccagctcatccgcgccctctgcatcgtgagtataccaaccagctgcatgccgcgacgtttgctcctctaacggacgaacacctgtgcgttcttcttcttcttcttctccggccagggatccctgcaagccgggacggagacgtcggcggcggtggtggagtgggcgatgtcgctgctgctgaacaaccccggcgcgatggcgagggctcgcggcgagatcgacgcgtgcgtggggcagccggcggcgcggctgctggaggcggccgacctccccaagctgcactacctccggtgcgtcgtgatggagacgctccggctgtacccgccggtgccgctcctcgcgcacgagtcgtccgccgactgcgacgtcgccggcttccacgtccgcaaggggacgatgctgctggtgaacacgtttgctattcacagagatccacaggtttgggatgaaccagaatccttcttcccagacaggtatccatcttcttagtgcttactctgttcatattataaataattgggaaaagtacgaattaccccctgaactattgcggtctaccgaattacacccttgaactcaaaaaccagacattgctcactccgaactttcaaaaccggacgaataacccccttgatccaatctaaagcggttttgtcctatgtggcaatccagtcagcaattcctattttaaaaaaatgtgggacccacatgcatacctccctttcccctcttcctctctctattctctctctctcacacacatatgcacctgatgcagggggcaggaagtgggcgcctgggcggcggcgtgagcggcggcggcgcgagcggctggcgactagcggacggcggcgcgagcggcagcggcagggcgcggctggtggtgagcggcggcggacgggtggacagtgtgcgggggcggacggtgggcggcggtgcgcggcagcggatgggcggtgcgcggcggcacgcggggtggacaggtggcggacgggctggcacacgcaatgagaggtgggggcggggacgagcgatgggcagtggcgcgcgcggacgagcggttggcggcggtgcactgtggcagatgagcagtcggtgcgcgggggcagcagcggaacgcggggagggcgcgaggtgaggcggcgtcgccggaggtagcagcccgtggctcgcggtctgcttcccctcaccaggactccctctctctcgggcatgggcacatgtcgctcggcacgggaaacgaaggcggcgggcctgttcaagcttgttcgcgtcgtggcgagcgagcagcacgttcgccttcggcatgaatgctcggcttgtctccggttacatggcgcagttcgtggaagacagcgacgatgacgatgttgtcgaccatgaccgcatcaagcccgatgccctggacgacgagtcaagcagcctcgtgatgttgtaccgcgtgtggcggatggcggagcacgggaacgtcaacggcctcctcgccaagcggccctcttcgccgccgcccattccgccctcaccgccgtctcgagcgacagtggctgccggagccctcttcgccgccgcccactccgcccacaccgccgtcccgagcgccggtggctgccggagccctcttcgtcgccacccactccgcccgccatcgtcctgagctcctctagccgtcccgagctccaccgccctcgtcgtcgtcctcgaggtgagggagggagaagagtgaggatttgggagagagatagagaggtgaggggtaaaagagagggtgagagactgacatgtggggcccgctgatttaaaaagaaaagaattgctgactgggctgccacgtagaccaaaaccgcttgtaaagctacttgggggggagggggtttcgtccggtatagatagttgagggtgaaaaatgactggtttttaggtttaggggggtaattcgtactcactcaatacttcagggggataattcgtactttttcctaaatcatttgatttttttctaagtcaaactttttaaatttagccaagtttgttaaaaatatatagtaacatctattatattattaaagcatacttgaaaggaggcaccacgttcgttgtgggggctagaaattccaagattaatcagagaaaaagaaaaaaggagagtccaagtagaaatacaatttaaaaatagcttaaattcggaattaaaaataaggaatattgaaagaagagtcgaaataaaaacccaatacgagattaattaaaattcggaataaaaataaaacccaaaattagaaaaaaaaacaaaagaagatttcaagtaggaatacaatttaaaattagctgaaattcagaattaaaaataagcaatattgaacgaagaatgcatataagaacccaatacaagattaattaaaatttagaataaaaaataaaataatatccaaaactagaaaaactaaaagagaattcaagtaggaatacaattttgaaacaactgaaattgaaaataaaaaataaaaatattaaaagaacacaatacggtattaattaaaatttttgaaaaaaaaataaattatgaaattagaaaaagaaaaataagatttcaattaggaatacgatttataaataactaattttggtgataaaaataaagattattgaaataaaaaaccatttaaaacacatgataagataaattaagtaacatgcctataaatgagtagggtggtggcggttgatacgacatataaaaactgttaataaaacaccaaataaaatcctaatgacgattaaaaggagggacgacaggcatgccgtgaagcaaacgtgcaaggcggttgccgggacttctagaaagtaaaaaaataaaccccattgataatcatattcgatttttaaaatctcaatgacaataaaaggagaaccagcgggcggggtgtataggagtatagttgcatagccgcggacggttggcgggatttctagaaaataaaaaataaattccaatgatagttatgttcgatttttaaaatcccaatgacaataagagtaggcgtcggatgggccgtagaggagtgtagtggcagcgtttgatgggacttctaaaaatcctaaaaaatgaaacccaacaagataataaaagataataaactctaaaaactatagtatccaatttttaaagattcgggacttcaaaaaatgaaaaaaaaacccagtgataatcatattcgatttttaaatctcaatgacaataaataaaggaggtggcggacgagccatagaggagtacactggcaaagccgctgacggtttggtgggacttttagaaagtaaaaaatgaactcaaacaatcactatgtttgatttttaaaatggcaatgataataaagagaagaaacagtggataggccgtagagaagtataatgttagcgtttgatgggtaaactctaaaagttataagatccaatttttaaaggttccaaggagaatgaatagaaatagtggtagatcgagcaagcaaataaagaatgagatgacggaagtaaggggtagtaactggtatgacttttaaaacctataaaattagaagcataaagatgataaggtttggactttcaaagtcttagtacaatgagatagctatttaagaaattttaagtaaaatcatattaaaaaatgtataattttgtatggtgctagccgcgcaattgtgcgggccatctagctagttttcaatataaaacaaatatatttgcaaaatatattcaatgttaaatttaattaaactaatttagtgttgaaaatgttactaatttttcctataacctggtcaaactaaaaaagtttaattaagaaaaaagtcatactaagaaaaaaagtcaaatgacttataatatgaaatggatagagtaatggatagagtagtatatatcaatatatgcatatacaaatgttcgtttcatcttactctttacatgtaacccattgtcaatatatttgtgtgtaagttgttactagtactaaaaaaagagcatcttaataggtttgcggatggacaaaacgaagcgaagatggtgatcccgtttggtatggggagaagggggtgcccgggagagaatttggcgatgcaaatggtcggacttacactagggacgctgatccagtgctttgattgggaaagggtgggggaagagctcgaggacatgggtgagtcctctgggattacaatgccaaagaagttgcctcttgaggcattctatcaacctagagcatgcatggttcatcttctttcgtcctaatatttaatcagcagttttccaaacataattggttgttgaactctgtaatcgaaagaaatgatgtagctcaatttggtgtgatttgcccatagtaattggtgcctctgttactctatatatgtatcctatgaaactttttatgaacctaactagttgagaactggtatgtgttttgataagaatatactagaaatattggcgtgctacgctgcgcccggttgacgttgccattgactttgaaggaatacccattataagtaatgggtctgacaaatgtctgaatttcattcacccgaatcacatcgatcgcacaagaacataaacatgtttgcttcggcatgtaatggttgaagtaggataaaagaacttctacagaatatctttacacaaagtggtgtctgaaatcaatgtcaacttgcaattacattggtattagaattaggcaaaattaactaatgtatggagagctcccgtgtttggccatggccaggacaccataaaaacaaaaggtaaatctttgctctattatccttccaatcgtgccaatatcattcagcaaggcatcacctatcatacaattcgatagaacatataccggtgttaccacactaatatattgaggatagtatcaatggagaaaagggaaagatgcaagtgcagtgactgattccgtaaagatgggtaaggtaaggtatatataaacagagaagatgttgacctagtgaataaagcaccaattattagtgcagtcaacaggagagaaataactcaacaaataaatgaattaatcagtgactaaatatagcagtttctttgtgtaagtcaaaactaaaacctatggatatgctatataacttatctatacaaagattaaatcatatgtaatcatgtaaggacttcacttgtcaaatgtcaatgcttagctaagttaatgtggcataaagatgtaaccaccatttgagagcatgaatacaacacaatagaacttgattacacatgctatttgggagctttgctcaacaactgattactaccaaacggttaaattctttatttgtactgtagtttggaataaactaatattaatatgaatatataatatggacatgtaactttataaagggtcgaaaaaatatgtttcaggttataacaaaatcctgaaatgcaataaaggtaactgagttttagtcaagcaaatatttagagtgaatttattttatttgaacactacaataaaaaatgtgtgtggtaagaaatatctacaactactgcttcaattggttgtgaccaaagcactgatgaagatgaattcagactttatgaattattgcatgtaaaggaattaagaccctattttatataacgtatttgaagaatacggtacatgcaaattgcgggtttaagtaagtatgttctctgaagtgatgtaccagttgtaagccttagttctggcaattcactgttaactgatcttgtcaagtaacaacaactttatagctaagttaatgaccatgtaggtaagcctaattacccacaagccatgtctaactgtactaatgcctatctttttactatttaggtcaaatgaaacacaccaattttggacatttgttatgagtccacatttttcctaccagcaggaaagaatgatgaaatgactgttgttgtttcatacagatgctgtaaaaaaagagtaagaaactataaccagaaatgtgataaattgacattaaagaatgctaagtataaccagaagaacatgagaacctgacactgttagatttgtgctgcagcagaacttgcttcagcaactgatacttgttgaatacatcaatgaggcttgacaaaaagaaattgcagttaggagcaactgcagagaaaaagcattgcagtcaacctaaaacttagtgccactgattgggataccacagttatagcgcgctcattggcaatgctctggccaatatgaaatgaagatgtaattatgagaaatcagttctgataaattgaaaattactttgtcaaatcctaaatcattgtacattgctccggaagaagaatgcacttctatgaacagttgctgaaggcgcttgtttgaatgaaacattgtgttgaatcctctcaaaagtgaaaatttttctctattgtgttaatgtaagataataattgacctaagaaaaatggttaacttaaattaataagcaacagactaactgagctttcaacgcattatctccatcatggattaatgataaatagttcatttaaatgtgcccatcttgtagagaaaaaggatgggcaaacaatcttgttatgaataaggacaaaccaaggacagtaatgagcatatacaaagaaaagcaattagaaaatctattatcttctacactgctattgggaagcaaaattcaatgtatatagtttagagtttacttaactttgtgcagaattggctacttgtgtagatcatgtgctcgagaagatggcgttctgagtctgtctgcatcctattttctctaacaaaaggaaatagtgtatgagaagctagaaccaaatgtattccatgccaaactaaacaatggagggggaagcagatctcactaaaagatatggctaactgagacagaaaaaagcaggaaacgcgaacacactatagaatcattgatttgaatattatacctgattaccagagcagttaccataccagaaaaggcaaggcagtaatgtattcagcagttacagctgcaattaagaataaaatcatgcacacacaaattagcatagtaaacatagaacattaaagataactatcaaagagatagaataggatgccaacaaaagtaggatgggtgagggtagcatacgaccaaaacagaacagagacctaatcagcatggcacaagcagaagggagagaagccccactcgtactgacctatggtcctctcgcataatagcagccatggctgttgcttcaccttagattgtgaggctaggtccccgtgccgtgatgcagaccctggttgtggctattggtcaaagatgcgaggatagcgtctaggaaggtacctaagggtggaggaggtgaggattaccatggtcaccaatggaagaaacgatttctagtgaggagggaggggaaaatcatatcagcggcacaccatattgtggattttggaggaggcgaaggctagatgagagaggtcggacggaaatagggattggagcgatgggatcggaggtaatctagaaggctttcattggatcaccttcgcagataaagtggaggccctagggcctcccgaccgagcgcacgcggccgaccaaaccgttgaggcaagtagctccgacgggaaggcaatgcgcagccgaacggtgaaggaaaccctggggaagaagaaaaaaaaagggagaaatcactggattagactgctactcagcaggaagaaagaggaaaaagaaaggaggagaaatcgccggcgacctcaccaagaaaaccgaagaggagagaatggggagaggagggatgtgcgcagcagccgagaagagacttcaccaagcatcctccactaccacgtacggcggcaggagacggtggccaatccggcgtgcgcttacacggcaagcggtgtttctagcgccgctccgtgtggaacagaagcacggaaacacggaaatagaacgtgggctgagcaatgagaaaggtaaaagcccatgtgtaaggaagggccggcacaggaaaatggcccaataggaacgcatctaatcctgtgctactaaaaccaattaaacagaatctaatatatcgctgcgcactatcgctgctaattgctaaatgcatatgcgctttaattatccgaaccaaactgatgacgtggcgcccctaatcttccaaagatcccacggggtttaagtaatctaatattagtataagttaaaactcgattggcaatggagcaacaacaagtattttgtactcgcgctggcttgacggttatccttgcctcattgtctaccatatttatggcttttacatcatgacaacatcatgacatgactgtgtttagtttctgaaattggggagaagtttagggaaagttggtagtttggaaaaaaagttgagagtttatatgagtaggaaaattttggatgtgatgtgatgaaaagttggaagtttaggagaagtttggtgtgaactaaacaagacctaaactatagtgcaaaaggttaaatgaattctgatcaaaattcgtccgttggcataccttcgcttcttcccaataaaaaaatttcgctgattaaattgtttagccaccaaatgttggtgataaacttcgaagacaattagtgacaattttgttaggagctagattttaaaaatagaattagttctaacacacaattgttacttctatttcgataaatacaaatatattttatctcaaactattgctctatttctgaaaaagtatatttattttatgtaaaattatatagatcagtttagatcgttcttatacttgtacccaccatatttcaccggtgcattttttttcttttttttcgatgaaagtggtaatttatatgccgcgatgaaaactgtaactcttttacatctttcgtataaaactaatatcacgtaacgtaataagaaacaccgagggatcttccggttagctacacaaggtggtgagctagacgacttggattcaaatgctcatccattataattatttgatattaggtaatttcttaatatttacgtctttacataatataatataataggtagatataatcggtaagaacaattcataatactgattaaatttcataaagctacatatacttatatgctatatgtttaacctaatacttttcataaaactacagacttaaagtatcgtatcatattagaaaaatacaaatttaacattagttttatcacaaaactacaacttttatagccttaaatatgatatggataaaaactctaaaatctatagatattttataatttcatcagtaaatctgtagttttggatatgatgccttaaatcagtaattatatgagaaatttgatacttcctccatttcatattataagactttctagcattgcccatattcatatactccctctgacggagcgtggggctcctcaccgggagaccgcgcaggcccccctttgccagttcggccgggggcgctaagtgaggttcttcaccctcgatctgtggaatgtacgcgagagagcaaacgcacaagacacgggcgatgtagacaggttcgggccgctgagaagcgtaataccctactcctgtgttctggtggatatgtgtgaggaagagttacagagagtcggggagcaagagagttcaagctctagaacccctctttttccttctcttctggttcttttttctctcgatctcctcccccagctcaagtcttctcagagttgtccccccttttctttgtgggcaaggtcctccttttatatctcaaggggataccacatgcaccacttctacctactcttcttttgggtggggacccaccctatcttgaccaaatcttgacacgcacctccgcctggaagctaaatcaacgcctgtccttgagtgatgcccagcgccgtcactcgtcagacacaggggatcaccctgtcatttcttcattaatgggcggagttttgcaatggccgctgtccgaatgaccctccgatgggatgggtcatacctgcctccactccgctggaagctgatgcaacatgagagcacggttgtctgccgatgacgtgaccggcgtcggaccagtgacagaccggtcattcttgtccaccacgtgtcagtttagcatgccacacatctgcccttcttcatacagtgacttccttgcaatggttgcgatgaagcctggcatgaatcgagccgggactgatgtgctaactccaggagttaccacgctggctccagctagggacgagtgccaagaggctctcatcattccgacgggacggggcgaggcgtgtgacagtccgcctgctgccacctaacccgcgatctgaccggtctgtgaccgatcacacactgcgaccggtcacggaccggatatgcgtgcgccgtgctgcattaaatgcggcgtggcgcgcttgtccattccgcaataaatgtggtttggtgagcgccgctgtgcccacctaactcacaaacatggcgccaataccacagggggtcggggcaccccagccctcggggccgaagcaggagcggcccgacccctcgggaagacagaggaggggtggccacgtctccctcaggcccgacccccccccccccgagggggttaggccacgtgggtgactgcggctgcccaagcctctagtcatgatacccccgatcccatgtcaccgacagtagcccccggcgttatgccagggcgatcgcccccctcgagggaagcgctcgggcgtgacgccactccttaggtctggtgacaggtgggaccggtctctacaggtgggcaggaacccagcggtcgcaaatcgcgcgcatcggctagggaaaaaacgaccgataataatgagtggcctcttcaagaccgctacatttctcgaaatagcgcgcgaatcgggacgagccggttcatttcgcctggagatatgatgatggcgcttcggtcggcgagcgtagttaacgcgcgcacgatatgtctcatctcgactgccacggccgcacatccgcctcgtgcgccgcaaaagggcgagtgggattagtggaggcgtgggcgcgagaaacgagggggcgagatagtgggcgcgggaaacgaggagccgggaatagcgttggcaagggtataagggcgccaaggaagagattcgtttccttcctctcgccattattccccttgccttcgccgcttgcgccctaactccttgtttcctgtgccctacccttgccgcactcactcgttctcaagttcctcctccgccggcgtcatggcacggggctccgcaccgctcgacggtagcgtgctgccgccttcccgcatcgtgagcgagaggcaggccgggctgccgcgccgattcatgccggaatctaccgccggtcgggaggtggtcgagctgggcgagggacgcccggcaccacactacccggggcggtccgtcttcttcctccctttcgcaatggcagggctggtcccgccattctcttctttcttcatggatgttctggagttttatgatctccaaatggcgcacctcacccccaacgcggtaatgacgttggccatcttcgcgcacctgtgcgagatgtttatcggggtgcgcccatctcttcggctgttccggtggttcttcaccgtacagctagtgtcgccgccgtcggtagttggtggctgctacttccagccgcgggggccggtgctgagccactacattccctgcgtcctccgcaagaagtgggacgactggaagagcgactggttctacacccccctcgccgacgaagcgcgcctccgacttccgagccagcccccagcgcaggtctccagctggcgggcgccggtagatctgggagacggctacgacgccgttcttgaccgcctggcgggtctgcgatcccaggggctcatgggggccatggtgtacggcgactaccttcgtcgccggattgcgccgctccagcggcgcgcccggggcgcctgggagtacaccgggtccgaagactacatgaggacccaccagggggtcagatgggactgggcccctgaggacttcaagatagtggtccaacgggtgctgaatctcagctccgtggaggcatccctcatcccccaaggagtcctccccctctgcagcgatccagatcgcgccaccatcctgaccatcatgcaggcggtcggggcgtcggaggagcgggctcctggaggccacgatggcgcgggcgggagccgcaggggggaacaatctaccccgggagggggtcgtgcttctgggccccgcgacgggggcccggggagcggccgccccgccgacgcccgggggaaaagaaagcaggaaggaaccccttccccatctcctccccgagggggcggggcggcgcgtgccagcagcaggcgcccggagggtgccgtgccgtcgtcgcagcccgagggggagcgaaagaagaagcggctccgcaagatgggggagaccgaaccatgccggggaaaccttatctcccccccaaggtggtcgtttagccgacctcctcgcaggttcgtccccgcgcccactgcggccgtattcattctcccatctcccaaggcaagttttcactcacccgtttctttttgtcttctggtttttcttctgcctcagcgagattccatcacgcccccccccccgccattccaagtccggccagtccgaggccgtggagacggcgaccgcggaggcccggaggcgggaggctgaacggcgagaagccgcagaccgcctccgagaagccgaggaagctgcccaggaggccgtccgggttcgccgggctgaggaagccgctcgggaggaagccaaactccgccgggccgaggattccgtccgggaggcggagaaggcgcgcgcacgccaagcggcctgccaagcccccgacccgactccgcccgaggcgaccacgacttccgaggccacccacgacgaggccgcgggcgcactgctcgggcccgacccctcgggcgacgcacgggacgtgccagcttcgggggacgcccccgagtccggcacgtcgattggcgggccgtgccacgcggcgcccgcaccgaggcggctctcccctatgccttccgctgccccactgaacgcggagcccctcctgcaggccttagccgccgcaaacaccacggtgctggacgggctaggtgcccagatggaggtcctgcaggcagagtggacatagctcaacgcggcgtgggcacgcgtcgaggaggggcggcgctcggtggaagccatggtggaagcgggccgcaaggcacaccgccgacacgcctcagagctcaaggcccgtcggagggagctggcagagatcgccagggaggtggaggaggagcgggagactgccctcatcgccaccgccgtgctcaacgaggcgcgggacgatctccacctccaatacgggagccgggcggcggagctaaagaagaaactcgatgccgcccggggagtccttgacgccgccgctgcacgggaacggcgggcggcggagaacgagacggcgtcccggcggcgcgaagaggcccttgaggctcgtgccaaagcgctggaatagcgcgcacgcgcgagggagaaggacctggcggaccgcgaggccgccatcgccatccgggaggcaacgctggcggcgcatgaggccgcctgcgccgaagaggagtcagcactccgcctccgcgaggacgtgctcaccgagcgagagcaagctctcgaggaggccgaggccgcggcgcagcgactggcggacaacctgtccctccgcgagacagcgcgggaggagcaggtgcgccgcaatctggaaagcgcccgcgccgagagggccgcactggatcagcgggccgctgagctcgaggcgcgggtaaaggagctggacgcaagggcgcgtagcggcggggcggccgcgggcgacagcgacctagccgcccgcctcgcagctgccgaacacaccatcgccgatctgcagggcgcgttggactcgtccgccggggaggtcgaggccctccgcttggcaggcgaggtagggcccagcatgcttcgggacgccgtctcccgtctagaccgcgccgggcgacaggcgggcctctggggcgagcggaccgcgaagtatgccgccaaccaggggggcctcgcccaacgcctttcagagatggccgggaccctccagcggctccccgaggagctcgaggagacgatcaagtcatcctcgagggacctcgcccggggggcggtggagctcgtactggcaagctaccaggccagggacccggacttctccccgtgggcagcgctggacgagtttcctcccgggaccgaggacgacgcgcgcgtgcaggtccgggacgccgctgaccacatcgtccacagcttcgagggtacggccccccggctcgcgttcgccctcgactccgatgaagagggcggtgacggcggtgacgaggccggcgacccgggcgtgtcggaatgagctcccaggcccctgccaatctttatatagttttttctttcttcttccgaggccttcgggcccccttcttgtgtagactaacttaatctgcaatcaaataaagaggaaattttttgcgtcaattctatttgttgtgtgtatgagacgaggatggtctgtgccgcggtccttctgtgtcttggcttgaacaagggctcgtgcccaggtcccagcctcaaacggcgcgggtcggggctagtgcctggggagatccacatgtcgagactggccaggccgggagcgtggtgaccgagggttatgggtgacccgattgtgggcctttgccgattcccccccggagttcaccacgccccggggcacggctcggttctgggccccttttggcgattttagccggcccgggccaccgagggcaggatcgagcacgagcgtgctaattcaagtcaagattcagcaaaaggaaacaatggcacagacacagtccttaggaaatcaaaaatgcttttattgaaatacagaagagaaaaaagacaattatctgtatgtggtagcccccggccaactctgcacgcctgaggggggtgcggggttggcccgagcccgagacctgacacccgacccccactaggggtagaagcgacgaaggtgttcgatgttccacgagttaggcagctctgtgccgtcgcccgtggccagccgaactgagcccggccgggggacgccgatcactcgatacggaccctcccacattggtgagagcttgctcaatccagcacgcgtttggacgcggcgtaggacgaggtcgtcgacgcagagtgatcgggcccggacgtggcgctgatggtagcgccgcaggctctgctggtagcgcgcggctcggagggccgcgcgccgccttcgctcttccaagtagtcgaggtcatctctgcgaagctgatcttgatcagcctcgcaatacatggtggcccgaggggacctcagggtgagctcagatgggagaaccgcctccgcgccgtagacgaggaagaaaggcgtttccccagttgctcggcttggcgtggttcggtttgcccagagcaccgctggcaactcctcgatccacgagtcgtcgtgcttcttgaggatgttgaaggtcttggttttgaggcccttaaggatttccgcgttggcgcgttccacttggccgttgcttctgggatgggcgggtgaggcgaagcagagattgatgcccatgtcttcgcagtagtcaccgaagagttcactagtgaactgggtgccgttatccgtaatgatacggttaggcaccccaaaccgagcagtgatgcccctgatgaatttaagcgcggagtgcttatcgatcttgatgaccggataagcctcgggccacttagtgaatttgtcgacagcgacatacagatactcgaacccgcccggggcccgcctaaacggacccaagatatcgagcccccagacagcaaatggccacgaaagaggtatgatctgcagggcctgggccggctgatgggtttgcctggcgtggaactggcacgtcctgcaccgccgaaccaagtcgaccgcatcgttgagagccgttggccaatagaaaccctggcgaaaggccttcccaaccaaggtgcgtgaggcggagtgggctccgcactcgccttcatggatatcggcaagaagctcgacgccttgttcccgaggaatgcacttcaggaggactccgttagccgcgcgctgatagagggtcccttctaccagcacatagcgcttggagatgcgctggaagcgttcactcccttcgcggtcctcgggtagagtcttatctatgaggtacacctggatctcagtgatccaagcaatcgatctaagggagctgggagcgctcccttcaggtcccgaggcctggactccgacgggcctcgggggccgttcaggctcgtccgtctcccctagggggtcgggtcgcgccgacggctgggcaagcctttcttcaaaggcgcccggtggggtctgggctcgcgaggaagcgagccttgagagctcgtcggcgaccgcgttatcccgtctgggcacgtgccgaagctctatcccgtcgaaatggcgctccatacgccgcacctggcgcacgtaagcgtccatctgcgggtcagagcaccggtactccttacagacctggttaacgaccagttgggagtcgcctaacaccaggaggcggcggatccccagtccagctgccaccctgagtcccgcaaggagtccctcgtactctgccatattgttggtcgcccgaaagtcgaggcggaccaggtatctgaggacgtctccgctcggcgaggtcaatgtgacccccgcaccggcaccctgaagagacagggacccgtcgaactgcatcacccagaaggcggtgtgaggcagctgcgaggggcccgagctggcctcagggacggagacgggctcgggagctggggtccactctaccacaaagtcggcgagggcctggctcttgatcgcgtggcgtggttcaaagtgcaaatcgaactcagagagttcgattgcccatttcaccgcccgtccaataccctctcggttatgcaagatttggccgagggggtaagacgtaaccactgtgacccgatgcgcctggaaataatggcgcaacttcctcgaggccatcaggatagcgtaaagcatcttctgggcctgagggtatcgggtcttggcgtcccagagggcctcactaacgaagtagacgggccgctgcacctttcggcggggccgatcctcttcgccagccgtatctccagggcgcttttcgtccgagaggccgcgcggggcgtactcggcttctgtgtcgacgacctcggggtcggagggcgacaggcgcggccttcccgcagtggccccggggccatcctgggggtcgggggcgcctgtcaccgtcggacaagcgggcagagggccagctccggtcgtcgggggcctcgggccgccgttcggctcgggggcctctcctccctgctctctcccgggtcgagtcgacacagggcgctctttgtccgagaggccgcgcggggcacactcggcttctgtgccgacgacctcggggttagagggcgacaaacgcggccttcccgcagtggccccggggccatcctgggggtcgggggcgcctggtaccgtcggacaagcgggcagagtgccagctccggtcgtcgggggcctcgggccgccgttcggctcggaggcctctcctccctgctctctcccgggtcgagtcgacacagggtgggggtgtgcggagcgagggtcgtcctcgtcgcgctccacgaccaacgccgagctgaccacctgcggggttgccgccaggtaaagtagcaacggttcatctggtttcggggcgactaggaccgggggagaactgaggtacgccttcaactgagtgagggcccgttcagcctcctccgtccaagtaaacggcccggaacgtttgaggagcttaaataggggtagcgccttctctcccagcctcgatatgaaccgaattagggcggccatgcaaccagtgacgcattgcacatccctaagtttgctggggggggcgcatccgctctatagcttgtatcttctcggggttggcctcgatgcctcgggcagtgaccaagaacccgagaagcttgcccgcaggcacgccgaacacgcacttgtcggggttcagctttatgcgggcggagcggagactttcgaaagtttccgctagatccgagagtaaggtctcttggttgcgcgtcttcacaaccaagtcatcaacataagcctcaacgttgcgtcctaactggctacccaaagaaattcgagtagtatgttgaaaagtaggacctgcatactttaacccgaacggcattgtcgtataacaataagttcctatgggggtgatgaatgcagttttttcctcatcctccctagccatgcgaatctgatgataaccagagtatgcatctagaaaacacaaaaggtcgcaccccgcggtggagtcgacaatctgatctatacgtggcaagggataagggtccttaggacatgccttgttaaggtcggtgtagtcaatgcacatccgaagcttgccgttcgccttgggaacgacgaccgggttcgccagccactccggatggatgacctcacggatgaatccggcttccagaagtcgcgccacctcctcgcggatgaaggcttgacgttccggggcctgccgccgtactttctgccggaccggccttgcgcccggccgcacggcgagacggtgctcaatcacctccctggggaccccgggcatgtccgccggtctccaggcgaagacgtcggcgtttgcccgcaggaaggagacgagcgcgtcttcctatttgtcgttcagaagaccaccgattcatgtggtcttagacaggccgtcacccagggcaaccttcttgaccgggacctcgtcgcacgtgatcatccgttgcctcggggcggccgggacggaggcgctgagcctctcgtcgccaccctcgggcttggacgccgcggcgagctggttcgcgcgctgctccatacaagcaagcgcgacttggaggtcgccatggacggtgatggggccaccagggcccggcatcttcatctggagataggcgtagtggactgccgccatgaacttcaccaacgcgggtctccccaggaccgcgttgtagggcagactgagatccgccacatcgaagttcacccgctccgtgcggaagttggcggaaccaccgaaggtgaccgggaggtcgatatgacctagcggccaagtgtgccccggcgtcacaccgatgatcggctgggatggctggagcaccatccctggggccttgatggcgtcaaaggctgcgggggaaaggatgttgagagctgcacccccgtatatgaggacatgccccaacttcacattgcaaatagtgggggaaaccaccatcgcgatctgtcctccccgggcaacgcacggcgggtggtcggtctggtcgaaggtgagggccacctccgaccatcgcgcccgccgcgtcgcctcatgggtaggggccgcggccagaagctctcgcttcatggccttgaggctccggcgagaagcatgagcacacgctcccccatcgacagtggcaactgtggcctgaggctcctggaaccccaggttatcgtcgccatcgtcgacatcctcggcgggggccttctgcttggcctcacctcgccggttgccggcgggggccgccggggccttgccctcacggcgctcctgcctcctctcctcctcccacttcctcgtccgctcagccaaacttttgaccgcgcggcagtccgcgaggtcgtggagggaggtgttgtgcacggagcaccacttgccggtcgggcgctccctgctgggagcttcggcctccttctttctgtcgctcgcaggcctcccctttcgggtggcccgcgaagcgccctcgacggtgaggacgtgcccctcgtcgtcggaaaaggccaacctcttcttcctcctcctgtcctgccgccctgaccgagcggcggacccggggacggccggagctgccacaccggaaccggaggagttccaggtccaggcctcctccttgcgagccacacggtccgcaagctgaaaaagctccgcggtggtctggggctccttggaggcgatcttttcgagcatgcgattgtgccgcacgccccccctgaacgcgtagatcaccacgtgtgcggggatgcacggtatagtgttgcggacttgacagaaccgctgaatgtacgagcgaagagactcatcgtcccctcgctgtaccgcgtgcaagtccgcttcttcacctgggcgcggatatgtgccctggaagttcatggtgaactgctggcacaaatcctcccaagagtgtaccgacgcgggtggcaagttcatcagccaaccccgcgcctgacctttcaggaccatggggaagaaattcgccatgaccctgtcgtcacccccggcggcctcaatcccggtcgtatagatctggagaaactcggcagggttgacgcttccgtcgtatttttcggtgatggtgggccggaaccttgggggccaacggacgttccgaaggctcgccacaaaggctcgacagccggcaccgccaaccggggacatgggaggctggcccccatgcccggactgaagtggcgctccggacgaggaagcgcccttcgttgcgtgggcagcacgacgaccattgcgtcggcgctcaatattgaggcgggcatccggccccccacgcacatcttctttggtcggaggcgtcgacgagggaatagcggacgaacggcgggtaacggccgccgctcgccgcgccctccgcctcgacgacatgaagccggtggtagcagtgccagaggccttgggggcgaaggaccgcccgccggcgcctaggcgctgctgcgccgtcatgaccaagttggccacatcatccagccaacgtcgagctggagtctctggatcggggacgacgggcgggtgacgcagaagcgcgcccgcagcctggagcgcgccctggggcgtgctgccatcgccgtagacgaggaggcgacgctccccgtctcgccgtccttctccatcacccgtgggtgacgaagtcgcggatctttcgatcccctcgagcgcctcctcccgcccaagacttcggcgaaagggggacggtggagtacgagctcgacggcgcgggttctgctccctgtcgtcaccgctagcgctcggagagaggttgtgcgccactgcccgttcggccattgggctgagcgggagaaacttggcgcacacgaaagaggataagggcttagaaaagcgcacgcgccccctacctggcgcgccagatgacggagcgtggggctcctcaccgggagaccgcgcaggcccccctttgccggttcggccaggggcgctaagtgaggttcttcaccctcgatctgtggaatgtacgcgagagagcaaacgcacgagacacgggcgatgtagacaggttcgggccgctgagaagcgtaataccctactcctgtgttctggtggatatgtgtgaggaagagttacagagagtcggggagcaagagagttcaagctctagaacccctctttttccttctcttctggttcttttttctctcgatctcctcccccagctcaagtcttctcagagtcgtccccccttttctttgtgggcaaggtcctccttttatatctcaaggggataccacatgtaccacttctacctactcttcttttgggtggggacccaccctatcttgaccaaatcttgacacgcgcctccgcctggaagctaaatcaacgcctgtccttgagtgatgcccagcgccgtcactcgtcagacacaggggatcaccctgtcatttcttcattaatgggcggagttttgcaatggccgctgtccgaatgaccctccgatgggatgggtcatacctgccttcactccgccggaagctgatgcaacatgagagcacggttgtctgccgatgacgtgaccggcgtcggaccagtgacagaccggtcattcttgtccaccacgtgtcagtttagcatgccacacatctgcccttcttcatacagtgacttccttgcaatggttgcgatgaagcctggcatgaatcgagccgggactgacgtgctaactccaggagttaccacgccggctccagctagggacgagtgccaagaggctctcatcattccgacgggacggggcgaggcgtgtgacagtccgcctgctgccacctaacccgcgatctgaccggtctgtgaccgatcacacactgcgaccggtcacggaccgaatatgcgtgcgccgtgctgcattaaatgcggcgtggcgcgcttgtccattccgcaataaatgtggtttggtgagcgccgctgtgcccacctaacttacaaacatggcgccaataccacagggggtcggggcgccccagccctcggggccgaagcaggagcggcccgacccctcgggaagacagaggagggggtggccacgtctccctcgggcccgaccccccccccccccgagggggtcaggccacgtgggtgactgcggctgcccaagcctctagtcatgatacccccgatcccatgtcaccgacaccctccgtttctaaatatttaacaccgttgactttttagctcatgtttgaccattcgtcttatttaaaaacttttgtgaaatatgtaaaactacatgtatacataaaagtatatttaacaatgaatcaaatgatagaaaaagaattaataattacttaaattttttgaataagatgaactgtcaaatatatttaaaaaagtcaatgacgtcaaatatttagaaacggagagagtttatgttaatgaattcagacataacatctatatgaatatgagcaatgctagaaagtcttatatcctgaaacggagggagtattaaatatgtagtttcgtgttatatcctgaaacggagggagtattaaatatgtagtttcgtgatagtttagtcaaaatatatacgatatatacgtaggttttgtgaaatttattccaaaaatatgtatctaattgtttctctattttaaagtaggggaaaaaaatcctaaataaaaccctacggaattgtttattctcctgccttcagccgtctccacttctccacttgattggcagtcgccactgaccaactttccaaaacctcgtcgccggcggccatggcctacctcccgccgcacaagcgccactccaacgcctccacgcccgccccgaccccggcccctcctcctccctccctctcctcctccctccgctcgctctccctctcctcctccccacgcggccgccaccaccgcggcgccaccacccgcccttccagcaagatcgtccacgccgccggctgcgtctcccgctggtccacgctcccgcccttccccgacgacgacggcgacgacgacgggtcgctccgcctcgagcccttcccctgcgaccccatcgagcgcaggaccggcgccaagcccctcgccctcgtctcctcctccgccgccgaagcctcctccccctgctccgcggcggccgccgcatccaccgtcaccgagaggttcttgccggacctcctcgccgcggcttggagggcgaaggcgggcgatgtgcctgaggaggaggaggaggtgaagctgagcgtcgtggccagggtggggaaggtgctcttcgaatcgtcgtgagtctccttaatttctcccatcccatctaccatttctcgttggattcgtggaagaatgattgggtgttgatcacaaagagttgctgctgttattattgattgattttgtgtagcggcggcggatcacccgtctccatgaactcgctccgcgaagccgtgaaagcaggagaagagggctcgaggagcaatcttcataaatcgttctataccaatgtgcctagtgagtgcttggatgatatggagcgatccgctgcggagaagatggggctggagtttgattcctccaaagagcactaccatgtgaaggtttgcgcgtctggtagcatgtcaattacgatgttttgggtttatagttgggtgaaattaactttggggcctgtaaatgaattgtaggtctttgacaagcgtcaaagtgattctacaataacgtgcaaatgcaccgtgcaagaagatggaaagcttgctatccataaggtgtgcttaactgcttatcgttctaaccttagcctcttaccttttgtcttattaatgttctgcatcatagattcatatgagtagtttgcacattgtattttaattttggctctacttgtgtagattatttttctgagtatgattgctgaatgcccgaaaatagagtgttgggattgttagcattttgacttgtacccatgagaaataggaacaatgaggcttcatctttgtgagatgtatggcataaatcatagctaccggtctatcatagggatcttgattcgtatgagttttttgataaagtgagaagctggctcatataaacttgtctacttcatttgtggtactagatgaagcctattagctactttgtccttccaggtgttgtgattcccaaaatatatgcctttaatcatttttgaggtcgctagttcttactgattggtcttgtggatgcaacattatagtaaatctactaatgatggattagctcgattagctacaaacttccaatactatagactggaagcctacactatcagtaagcaagataatatactatgtgcctctcaaaattccaatgatttgtcatctagcacttactcatagccttttttttttcctgtagtggaacttctttaggatagtaacttctcacaattgaaccttacattgtcagttcgcagtagcactatgcaactctttcatgctaactataattctgtgatgcaatatgtggttttgtttggttcattgagaataagtgccctgtagatgccaaggagttgctcaagtgggctttgaacgttccaaaaggttggaggcccatttacaatgcatacatgtgagaaggagagtacatattctggagtgtatcagtacagggatacttaggaagtttgtgtacagtgtacttacaatacatctgtatgtgcacttacaaagtatgtacagttgaagaggtttagatttgaatgaggctatctgtacatacacttgaagtatgtatatttgaagggatttctgaaatgttcgtgccataaaatctatctaatcatcaccaactttctgaacttaaatttttattttgaaaagctgaaatataaccagtaactagcaagtcctaattatgggccacattgcacagtaatattcaattttccatgttttgttgaattcgatagcctatggtacacagccaatgccaaacactatactccctccatccttaagagattctggccccttcatttggggacggagggaatattttggttgtcaattgtaagaaatttgtatctattagtagaaaaggtctggtgccttttttccttcattgaaagagtcatcttttgtgtcctttgctaggagtacagtagacctagcatatctttccttggatggttgtatctgagttctaatgtaatccgttcttgattcagccttgaactattaccaggttacattatattttgtttagatgacgattgaattgacagcaatcaaatcaggcctgtgttaatgtgatcatgtcctatgtctattctactgaagaaatttcatgacagtggtttttgtttcttcagtttttatgaactgcaaattttatgttaaaagcatctcatataattaattggtaagtttgttaaatgcaaattttacccgtgtaggataaataaaactttgtgtgcgttgctatatccttaaaatatatattattcaatagaagaacgaactctttggcttaacatgtttgttttacactgtcatacttttccatgcaggttcagttgaaccaggtacgccacttggtggaagatatatcctgtctgttcaaggatctggacctgaggctgatgttgtctaccaaaagaatccttaagaacttagatgtgagttgggttttgtttgaaaattctgatcctttatgttatgagacatttttggcaaagttatttggtttttgcaggctgaagtgaaaaatgcaataaattgcttggtatcttctgctgttattgatcctgatgtcaaaggtggacttagatggcctcttgggaaagaatcgattgatgagaggttcagcatagttggagtgtggcatacaaactacaaagctttcagaaatgagaagttgaggctcaagctaaggcatgctgaccggtttgaccatcgaagctcaactggagaggtttctaatgaagttacctttaaactaattggcatatctgcaagtctggaggtaagtaaaatctgctcgtaagttaatgcgtatgtgctgttcttcagcatttacacttcagtttacattcctaataaggctatgatccaaagtccgcctccgctgtgtactgcatatcaattatcatgttaatatctaagatcccattttaccgacatggggtcaaccagaattggaatatgtggctaataatttctggtcaactgtgcagcaaacggcattatgagttaatgacctttgtaagtcttgttgttttccaggctgttgatcaggaggcgaattctctgcaggagatgctggagtctgtggtaggaatgatctgggagagcggtttgagctacaagaaggcgccctgagcacagttatgccgagtggcgacaagtagacaatgctacaagagcttcttgccgatgttaccgtctgactaccttctaccctggagctaacgggcgttgatctcagcccaccccatcatgtacagtttcagttagcctgtctctactgtagtgtcagtgtgtcattctggttagcaggttaagtagtagtgagtagtctatgggcatggtcgcatggtatggtaggttttccacttacttccttgctccttggcgtcataggttgatcgaaccacctacatgagacgctaaattcaagtgaagttgaaatgactatgcaattatgcattcttctgttaaacgagaatggcatattttataatataactttgagtaaattgcactcaagatacaattgaacctacaaacaaatatctgttaaaaatctctgtgttatgtttagatcaaagaacaaccaaccaaattctaggtggtgcttaaaaaatatgtaaaaactcctacccattccatcgaaaaaaaaaatcctaggtgccagttttagatcagaatacaactcattgttttttactgttgcacaaggcttagattctgctaaaggcaggtcgagtcttatactgaaactgcaacatactcttgttgtaataacttgttgaagcctttttcaaataggggtgtgaatttgtgaaacaagatattcggattaaggctgcgtttagttcctgaaattgggaagaagtttgaggaaagttggtagtttggacagttggtagtttggacaaaaaaaattgggagtttacgtgagtaggaaagttttggatgtgatgtgatgcgacggaaaattgagagtttgggggaagtttggtgcgaaaatatggcctaaattgagtaaataccagtatattggttgatgggggcggcgggagcattaagtatatataaacactggaccgtcattgccgtcgcggcgtcgtcaacaaatgatgagtcatgctgcaagcctgcaaccctcgtcgtcgcatcgccctggcctccagtctatggatcgatcggctttgtacatcctggtccttttttaagattttacaaatacactgtcagcaaaacttatgcagagatggacatgacgctgatcgattgcagccgtagccccgtagcccgtagcgacggaccgcacggcgcgtgcttctcttcgcctcaaacctaccaggtgttcggcgaaatgccggagcgggcttcatgccgctcgctcaccaccacgccggcgaggcggcgaccgtcgggtgttgctcgagctcggccggatcaaccaagccaccgccgacatatggtgaatcttccgtgccggataacttgcgccgccacgccagtctggtacggttgagcttaattcctccttctgcgatactcttgtatgattgggaaataggaatagggtttgggatgttgcgttgttgcaacaaatatacaacgggatgggataatcagacctgcagtgccgtaatgcaatctttaacaccagccacagtcgaattcacagggtggaaaatttacccaactcgactagaatagaaggattctgttgcgaaaagtgtgattctttctttttcatccaaagttaaagaactgtttgtttggtgggtcacgaatgtgtcgatttagtcaatactcctgtcactaatcaagtactattagttgtggtaggagtactagtcaagctcaccacctgtgtggtttagcagcgttatcctctagtttgttagcaggatccacatgcgtttctaagtagatttctccatttctgcccaaaaaggccttcagcttgtgtgccaaagctttctttctttgatctctcaaggactcaaacatggctggtgttgctgcggtttttgcagggaaagctattgcaacatcagtcatcacctatgtcatcaacaaggcattcgactacttgaaggataacaaggaagctggagggctgaagcctactagagagaggctggagaaactcctccctcagatcaaggtggtcttggatgctgtggacatggagcatatcggagaccaaagtgatgcactggatgcgtggttgtggcagctcagagatgctgttgaattggctaaggatgcgcttgatgaactggagtactacaagcttgagagggaggccaaaaaaatacaagcgggtagcaaggtgagtggctctctgcatcagtataagggcaagattgttcagcgttttaatcacacatttaacactgggtcactgaagaggttgaaaaatgctgtcaaggctttagctgatgttgcctctggtgttgagcgatttatccaagttctgaatcagtttggcaataaggttaactttaaacaagaggtggaattcaagaatttgcgtgagacaagctcattgcctcatagcctagtacttggaagagaagaggagagcaatattgtagttcagtggctgaccaagcgtgaaaacagtgcatctgaacagattgttggcaacatccccatattttgtatagttggtttagggggtattgggaagacaacactagctcaagttatatgcaacgataacaaggtaaaagattattttgatttgttcgtctgggtttgtgtttctcacattttcgatgttgaaacactaacgagaaagatcctccaaggtgtgactagaacagaaataggtatgattggcctagatgctctccacaaggcacttcaggagaaactgagttccagaacctttctcttggtactggatgatgtgtggaatgatgagagtctgcgtggttgggagactttagtaagtccattaagatatgggaagaccggaagcaagatcttgctgacaactcgaatggaatcagtagctaatcttgctgcaagagcgatgcaaggagaatgccagtctttatcattgagtgggctaaaagaaactgaacttcttcttctgttagaaagacatgccttttttggagttaatcctgatgattatagaaacttgcaacacatcagcaagaaaatggtaagcaaactcagtggttctccattggcagcaaaggttctaggtggattgttgaacaacaaaagggatagtaacacttggaacagaatattggcatcaagtgttcataatatacaacagggcaaggaagggattatgacagtgttaaagttgagctatcagcatttaccaacccatttgcagtcatgtttcaggtattgcagcttatttcataaagactatgaattcacaaagaaagaattagtgtatttatggatgggctcaggactaatccaacaatcggtagatggcatgacaccagaggatgttggaatgggatatttagatgcactaaccagaaagtctttttttgagattaaatcaagacctcggtctagtcgtgatataaaatgtcgtttatttgaagaatattacgaggaacggtttgttgtgcatgatcttttgcatgaattggcacggtcagcttcagtgaacgaatgtgccagagttagtataagttctgaaaagattccaaatactattcgccatttatgccttgatgtgataagtctcactgttgttgaacagatctcccagtcaaagaaattacgcacacttatcatgcattttcaagagcaagatcaggcagaacaagaacacatgctcaaaaaagtgttggctgtcacaaaaagcttgagggtattatccctaaccgcaaattatccctttaagctgcctgatgcagtgggtgatctagtgcaccttcgctatttgtctctctctctcatgtggggcgaaggaaacacgacacattcctgttggttcccacaagttgtatacaatctatatcacttgcaaacaatgaagttcaataatccgagacccgcagtccctatggaaggacaaatggaaggaatgtgcaagctggttaatctgcgccatttgcatctaactcttgtaataaggcccatgattccttttataggaaagctgacttctcttcatgagctatatggtttcagcatccaacaaaaggttggttacactattgtcgaactgaagaatctgagagacattcatcatttacatgtttcaggtcttgagaatgtttgcaacatagaagaggctgctgaaatcatgttggaccagaaagagcatctatctgcagtaacattagtttgggctccaggatcatctgactcatgtgatccaagcaaagctgatgcaattctcgataagcttcaaccacactccaacacttctaaattgcaacttgaaggatatcctggttctcgacctccattttggctgcaagatctcatactcattaacttgacatacatctatctacgtgattgtcaaagcatgcagtgccttccatatcttgggcatttaccttctcttcaatatctgtacatagttaacatgaagtcggtagagtgtgtggattcatcattttatggaagtggtgagaagccttctggattgcaatcccttaaggtactagagattgagaacatgccagtttgcacggaatgggttggattggagggtgaaaacttatttcctcggcttgagacactagcagtgcgtgattgtcaggagctgagaagactaccgactttacctactagcattcgacaaattgaaattgatcatgctggtttacaggctatgccgacattttttgtgagcagtgatggaagttcatcatcaatgttcaacctctctctgtctaagctaatgatatccaactgcccgtatataacaactttatggcatgggtgttctctttatgctctcgaggaattgtccatccaacaatgtgcaagtttatcatgtctaccagaagattcattcagttcatgttcctccctgaaaacccttgaaattgtgaagtgcccaaatctgatcgcacgacagatcatgttgccccatactatgagaaccatcacttttggattgtgtgctaatgctgaacttgcgttactagactcattgacaggtcttaaatatctgaaacggatctttttagatggttgtgcaatgtcaaaactccctttacaactgtttgcaggtttgatagggctaactcatatggtgttaaatgcttgctcaatcgcacaccttccaacagtggaagcctttgcaagattgataaatcttgaataccttttcatttgggactgcaaagagctggtttcacttatcgggatccaaggtctcgcatcgctcatgtcattgacaatcgctagctgtgacaagcttgttgaagattcatctattctgtcaccagaggatgctgattcatctggcctatctctgaatctcagtgaacttgatattgaccacccatcaatcttacttagagagccattgagaagcgtcactaccatcaagaggcttcaaatttctggtggacctaacctagcactcttacctgaggaatatctgttgcataactgtcatgcccttgaagaactagttctgactaatgcttctcatctgcaatgtttaccacaagcagtgacaaccttgacctccctgcagtccatgcatataaacaatgcagttaagattcagacacttccagatatgccagcatctcttaccagcctgcacatctatggctgcagctctgagctcaagaagagatgccaaaaacatgtaggccatgattgggttaagattgcacatatcagtgatgccgacattcgttgagatatgatacatgacatggaatgggatttggtacagcagagcatatgtgaacaatgcatggagttttctcaaacttttcagttctctgtcatcattacagcttacctttgtgattgttactaacattttgttagcctaaattgctaggaatgtactttgcattctcagttctggcaaagctacatatggattagaattttaatatcaaatataaccatctcggaactcacttctatgttaaatttcaaccagtactctacatgacaatgtaagataagtacctatttataatgatttttttcttaagaaaatatcctaataaaattgaaaaggacaaaaatgaaaaggtaaagtagtgaatcattataagagtacgtcacactttaaaaacagtaagagtaatactggcttagtggctttccggataaggttagctagacaagattgtttcacctaagttgcaggtgcatattgtgaaaattatatgtttaccatgaagatggttcatagattaatagctaaaatttagtctaacagtttaagttgattccatctgtggtgccatttattttctctcttgactggatcactaggttacctcaagcagtattttccgaaggtgatgacagttcattctgtactccctaatgcattccttacatctcttgtaggaattccattggaaccacagcttgagttcagttgcctggtgacagtaacacggagaagctattaattcttaatcttcataatccactgtgtacttcatttcacggactgtaatgtcaatttcataaaccagcagttaatttggcactctgccatggttttggtatagttcactctatgataaataccattctgctcaatatttctacccttgcattcatcgtattcacattttttgtttgcatgagtttaccttgtggtttgacacattcctgttataaaaggttttcttgtaaatatttgtatcttaactgcatgagtttggtcattttatttaaaatttggtcttgagtaggtaatggttcttcgctcagttcactcagctaatgtttcttgctgcataaccttgtaaatatgaccgggaggtattgcggtttgcctgatgaactaagggtttcagacttgcagtcacggtgacaacaattctatgtgtgcatggaaaagtgactacgaagcattgcatttgttatagttaactagataaaatatccgttgcaacgggtgaaagctattttaatcatattaattattgttagattttttttgtctaaaaattatatgggatttttataatgatagtattgatatctaatttggaacttttattggaatgatagccatatcatgtacattgttttcttgtggtcatgcaagaattctgaagcaattaggagtccgactctcatcccaagttaacatgtgagttttttttaaaaaagatttcttatacaactccttatgtattttcaaaagtgaacaaacttaaaagccgactcaaatacaaatggcgtaccaaagtatcagcgggaacatcttcaattttatactacaatgtactccacataaggacggttttcattagcaacaacaatgttttttttttcttgaaaggccatggcaatttgttggtgttgtataaaaagagatggaaatttagacaacttaaaatgtagtagtggtgatgtccattctcactgtctcacaccatcccttaccactgacatttgggccacataatgtatattattacaccactttgaaagtcctcatccatttcacattggctcccttaaattttaaaatcacatacttgttcaattagaaagaaatatagtattacttggactaaataggagtttattaattgacacgcgctaataaactcctatttagcgcgtgaaacagtagttcgagcaccacaaaatgttcccttcatctagtttttctttttttttaccaccccacattttctccgtctggtttttttcgttttttaccaccctactttatgtgtttcttttttctcatttgtgtttcatcaaagggcccgataaaatattaaccatctaaatttttcatgttttctggttccttctctctagattttttttcctatttcagtaaaatatttaccatctagtttttcttttgaattttttgttttcctagtgtctccccatattttaaaagtaacaaatttactgagttttctatttgctcccagcttcccactctgcaccttgaaaagtaataaatttacttacatggatgccccccttcaaaagtacttacttgtatgaattctcccacatcattcgacactgttcttagatggccgaaaaattactaccagcttacaacactagtaagtctttaaccagtgttataaatattgtttagactttgtagtctatgagtaaaccaattgccaccttcctgtcaatatagcccatgttctcgtagccaccatgtagtaatgtatttactaatgtgttcaatacacattataggagtaaaaactgatactaattattttgacagagtattgctaatctgaatcacaaaatggccgtgggaatgaaaaatttacaggggaatcaaactagaaaaaaattggtccaaccaaaaatccatcgtgaagctaagatctgggtggctttcctgtgtttttcctgtgaaatcggtcgtgagggaaactttccttcgattttcctatggccggttagtgcgatccgaatgggaggaaatgaaaatttcttagtgaatagtattctccccaaaatcctgtgcaaatctggtaatccgaataagcccacataagttgggaaaaagattgaaggaattgtggcaaagttcttcaccgttagagtggtaagcagggtgtttacacccaaatttagcacctaggattaaaataggaaagattgccaaaatttggaagtctgccggttttcttttagtgggccggtctgaccgccgtgtgttgggcagtcagaccgccggttcagggccggtcagatcggcggtgtgtggccggtctgactggcaggtccgagtccgactgtgtttcgtcgggtctcgaggtttccttgctcgggaaggcatgtttcgggtttcctttagtttctacctcgagttggacgtggagaagggcctgtagagggcaagaccaacccctatataagggacatggccggttcattgtaaaaatcaatatacaatcaatcaatcgaatcgtttttcatattgcttttagttttctcttagtttgtccatctttgtcggtttgcgctgtaaaccgtctgccgccgttgcaagagtgcgacatctctttgtaggtttgtcctgaaaaccttccgttttgcccacgagacgggtagttatctagaaatcggctccgctagccggtttagttatcaaaaccatctaggtttagctctttgctagatcgaggtggttggcgactctaggatcaccgcaaggcttaaggtgctgtgatcgtgcttgtcaacttgtcaaaaaagttgccaacacgatttttggcgactccactagggacgagatccgttcatcgtcaactcaacttcgacttcgccatgacgaagccgccatccaagacggaggtggagccatccaatatgataccggtcacattggatgatttcgaaggagaagaccgcaaagctatggaggaatacatcaacgaactcacacgggaggcgttgatgagggcaagcactaggactcgtcaaggcgtgatcatcaagcccgggccacgtcctaagctcgcccccgatttggtaagtaatggtgagataacacaatctatccaacaacaagtagcatctacaatagattcatctataattgcttttaaagataagttagatgcaacttttgagggtaaatttgatgaatttttaagggttaaattcggccctcttatggccgattacatgtcaaaagataaagcctctaccactgctaaccaacctcctatagatcaaacgggtagtagaaccgatggagcggcgcacacggtcggtccgaccgggcctgacgaccggtcagaccgtgacctagccgtcggtccgaccggccaaacggccggtcagaccgggtattatccccgcggtcagaccaggactcaggcaggtctgaccgcgcctctggatgccagtcagaccgggccctgggccggtcagactgacgcgattataccgatacaggggatagatctgatgactaatgctagttatttgtatcatcttagaacatttgatccctctgtatctactgctgcaaataatccccaagttcccccacatgttcctaatgcttataatgatgttgctagggggtatcctcccgatactagacaaggccaatataatcatattgcgccacaaacacaacctattaggccaccaaatccaccgccaaatcaacatggacctaataacatggaggatataattagtgagattattaggaatagattcgggattgaaactaggaatcgtgctagagtttacaaaaagccgtatcctgattattatgataatgtgtcgtttccccgtaattatagagttcccgaatttaccaagtttagtggtgaggacggtaagaccacataggagcatgtaggtcaatttttggcgcaatgtggtgaggctaatagtgatacttttaaattgcgcttgttttctttatctttgtccggtaatgattttacatggtttacttctttaccggcaaattctatcatacttgggctcaattagaagaaaaatttcatgattatttctatactggagaaactgagcttaggttatgtgatttaatatcggttaagcaaaagtataatgagcctgtcattgattatattaagagatttagggatgttagaaaccgatgttatagcttgaatataactgatagagatttggctggtcttgcttttaatggtttaattgctcctcttagagaaagactagatggccaacaatttcttgatgttagtcaacttatgcaaagggctctggctcaagaaagccgggttaaggataataaaaaacttcttagatcatatgacaaaaagcctaatgttatgattgattaccctgaggctagtgatagtgaagaggagggtgatcatgatatatatgttgctgaatggtcatggactaacaaaaacaagccttttgtttgctctaacctaatgctgactcctcgcaaagatcggcaaagtgaggttaaatatagttttgatgtggctaagtgtgataagatttttgattatcttttacaagagaaacaaattagattacctaaaggccatgtcataccatctcaagaagagttgaaacgtcgagcatattgtaaatggcatgattctcattctcattctactaatgattgcaatgtgtttcgacgacaggttcaatcggccatagatgaaggacgattgaagttcaccgatggctctaagatgaagcttgatcatgatccttttccagtgaatacgattaatttcaatgataagaaggtgttgatccggccggagcaagccgaatctactaagggaaaaggagtggtcattggcgagccaagacctaagatgatagtgccaaagaagccggagattggcgtttggaaggagaataagagtgaagcttcaacttctaaagcccctaggaagaccaaagtgacttttgatatgcttttggagaagtatgagaagcaaggtggtgagaaggctcacaacaaaggaaaaagaccaagatcacctcctagggagtgatttggtcattcaccgagacgatcgcattcacctccatatcatcatctacaagacatgtcatggggttcttattcaatgccgccaccgggttatccttatccttattatataccatggggggcaacaccgccaatgttcaaccatatgcctccaatgcaattcaaccaagggtggggaggaccaagaaggccaattcatgagcgtttgtcttcaccacacaatggccggttttatggtaggaaccgggccaatgaagaaaagagggaaggaaagcgcatcaaggtggaggcaaggacttcggaagtaattaccatcaaagtggggtttcatgatgtgccaataccttctagagatgatgttggagagtcctcaagcaaaaggtccgaagccggtaccagctcatcgcagtcggccggtctgaccaggccttctggccggtctgaccgcagccatacggccggtctgaccgggccatcaggccggtctgaccaccgacccgatagcggtccaaccgacgcctcaggccggtctaaccgtgcgccaaatgtcggtctgaccggcgcatctggccagtttgaccggtggtatacgtccggcctgaccgggctccagcgccggtttgataggaggtttgcaaagggcgatattggattcatcgtcttcaagcaaggttaatagaggacattatttatctcctggaacagagccgaatcctaggtggatgcctaaggatttgacggctactcaaaagagaaggttgcaacgtcttcgggctcaagaaatgggggcttttaactatttgccacttttagatttggcaaataactatttgccacccctatctcaatgacatgtgggtccacatgtatctatgacatgtgggtccagtggcaaaaagttaattgccacatctaaatgtggcaaatggttaaatatctccaagaaatgagagagaaaaaggccgaagaacaaagagataagaggtttaatgagttgcgaccaccaccggtatggaggcgtaagtccgtagagaaggaaaaatcggttgttgtagaggagaaggaggaataatcggttaataaaggtgaatcatctccaaaagaagatatggatatcaacatggtatgtatgttgcctatggagttttgtgctatggatgaagccggggttgctcaattctcattaggtcctaaagacgcggtttttgagaagcccgatgagtcaaaccgtcacatgaagcctctttatctcaaaggccatgttgatgggaagccggtctctaggatgttagtggatggaggtgccgctgtgaacttgatgtcgtattcattactcaagaagttgaggcgtgaggatgatgagttgaagaagaccaacatgattctcaatggcttcaatggtaaaccaacggaggcaaagggtatcttttcggcggagctcaccgtgggaaataagatgctaccaaccgctttcttcatcgtcgatgtgcaaggtaactacaatgttattttgggtcgttgttgggttcatgccaattgttgtgtgccttctaccttgcatcaatgtttaattcaatgggacggcgatgatgttgaaattgttcaagcggatacatcggctgaggttgcaatggccgatgctacttttgagtggcgtcatgggaatatctaatgtttatcggggagggatctttctaactatgattttattagtatctccgatggcaaatttgtacctatctctataaagctggctagtgtagcacggctaagccatataaatttgtataatgagtaaggaggctaatttagagtggttacaaaagagggtgcaagaatatcggtctacaaagaacgatattggtgaaaccattgaagattttgatgaagtggagaagcttggacaagggtttacatcggccgatccattgaaggaagtagacataggtgatggaaccaaaccaaggccgacttttgtaaacaaaaatatgagagccgattataattaaggttaagataatcgagctacttaaagaatatgttgattgctttgcatgggaatatcatgagatgccgggtcttagccgtgagcttgttgagcatcggcttccaattaaaccgggttttaggccttataagcaaccacctcgtcgttttaatcctttgctatatgaccgagtcaaagaggagattgatcggttgttgaaggcggggtttattaggccatgtcgttatacggagtgggtttctagcatagtcccggtggagaagaaggggagtggtaagattagagtttgcatagattttagagatttaaataaagccactcccaaagatgagtatcttatgcctatagccgacatgatgattaatgatgcctcgggtcataaggtgattagctttctagatggtaatgccggctacaatcaaatctttatgacggaagaggatatgtacaaaacggcttctaggtgcccgggatttgttggtttatttgagtgggttgtcatgacttttggattgaagaacgccggtgcaacatattaaagggcaatgaatttgatctttcatgatttgctaggtattatcttagagatctacattgatgatattgttgtcaaatcggatagaatggaaggacacatagccgatttgaggttagcttttgagaggatgcgccggtatggtttaaagatgaacccacttaagtgtgcttttggtgtgtcggcagggaagttcttaggattcatggtgcatgagagaggggttgagattgatcctaagaagatagaaaagattcgtgatttcaaagcgccgacatgcaagaaggaggttcagaagttgctagggaaggtgaattatttgaggaggtttatttctaatctagcgagtaaaatcgatgcttttgttcctatacttcgcttgaaaaaggaagccgattttacccggggggcaaaacaaaaagaggcgtttgaggagttgaagagatatttgtctactccacccgttgtgtgagcgcctaaagccggaaagccttttcggttatatattacctccgaagacaaagtcattggtgccgttttgacgcaagaggaagatggcaaggaatatatcattacatatttgagccgctgtcttttggatgccgaaacgaggtatgtctttatagagagactttgtctatgcttattctatgcttgtaccaaatggaggcattacttgttatctagtacatgcatagttgcttgtcaagccgatgttattagacacatgttgcaaaggccaattctaagtgggagaattggcaagtgggcatatgctttgatagaatatgatttggcttatgaaccattgaaatctatgaaaggccaaattgtatgtgattttatagtggaccatcatgtagatattgcttatgaggaaagggtttgcttagttgaagttataccttgaaagatttattttgatggttcttcttgcaaagaaggtcaaggcataggggtagttttgttttcacttaatggcatgtgttatgaagcatcggttcgtttggagtattattgtacaaataatcaagccgaatacaatgctctattattcggcttacaagttatggagatggttggagctaagtacgtggatgcttttggtgattcggaattggtggtgcaacaagtcgccggagtctacaaatgcttggacggatcactaaataggtacctcgattcatgtttggatattattgccaattttgataattttgctattagacatattgctaggtgtgataattctagagcaaatgacttggcacaacaagcatctagctataatgtgaagaagggattatttctgatattagaggagccggtgcttgcttttaaatctttgtgcgaaattggcgaaactggggaccaggggcggtctgaccggcattgcgtggccggtctgaccggtgaccaggggcggtctgaccggccacatgccgccggtctgaccggcgaccccgagcggtctgaccggccctgtatggtcggtctgaccagttctgggcagagcgctggggggcacgtttcaatcaatttagaggccgaattaattgtgaattcggacatttgtgcctaggaagcagaagaagattggagaattcctttgattcgatatttgaaagatcccacgcttaaggttgatcggaaaattcggcgacaagcgttcaaatacacattgcttgatgaggatttatatcgccgaaatatagatggtgtcttgttgaagtgcttagatgaagatcaatctaaagtgactatgggagaggtacatgaagggatttgtggaactcatcaatcagcccacaagatgaattggttgcttaggagagcggggttctatggccgaagatgattgatgattgcttcaaatattatagaggatgcgaggcttgtcaacggttcggtaatgttcaattggcgcccgccaccgtgttgaaccctataatcaaaccatggccgttccgaggatgggctttggatttcattggtcaaatttatccttcgtcatcaaaggggcataggttcgtgctagttgctacggattacttcaccaagtgggccgaagccgtgccgttgaagaatatgactcatacggaggtaattgactttattttgaagcatattatccatagattcggtattccacaaacattaactacggatcaaggtgcttcttttatatctaaagaagtgaagagttttgccgaatcttatggtattaaattgttgagttcttctccttactacgctcaggctaatggacaagccgagtcgagtaataaaacgttgttgaagttagtgaaaaagaagattgaggaatacccaaagaagtggcatgagatgctttctgaagcattgtgggcacataggatatttaaacatggtgccactaaagtcactccttttgagttggtttatggtcaagaagccgttttaccagtggaggtaaatcttggttctcttcgttatatcaagcaagatgatttgtcaagtgaagattacaagacattgatgggagacaaccttgatgaagtcatcgacaagtgattgaaggcattggaagaaatagagatagagaagaagaaggtggccaaggcgtacaacaaaagggtgaaagcaaagttgtttcaagttggagatttggtttggaagacaattttgcctttgggtactcgatccaaggagttcggtaagtggtcttctagttgggagggtccttatcgagtatgcggtattgttcgaggaaacgcatattttttggacacacttcaagaggagcgttttcagtgagtaatcaacgggaaatacttaaagaaatacttcccgagcgtttggcaagacgcttaggaggtactatggtcggtaattggattatcgtcctaagaccaaaacatgttctatgcttttagattcacgttgttcatcaaaaaggcaggggggcatgtgtttactcccaaatttggcacctagaattaaaataggaaagattgccgaaatttggaagtttgccggtttcctccgagtgggccggtctgaccgccgtgtgttgggtggtcagaccgccggttcagggccggtcagatcggcggtgtgtggccgatctgactggcaggtccgagtccgactgtgtttcgtcgggtctcgaggtttccttgctcgagaaggcatgtttcgggtttcctttagtttctaccccgagttggacgtggagaagggcctgtagagggcaagaccaacccctatataagggacatggccggttcattgtaaaaatcaatctacaatcaatcaatcaaatcgtttttcatattgcttttagttttctcttagtttgtccatctttgtcggtttgcaccgtaaaccatccgccgccgctgcgagagtgcgacatctctttgtaggtttgtcctgaaaaccttccgttttgcccacgaggcgggtagttatctagaaatcggctccgctagccggtttagttatcaaaacccatctaggtttagctctttgctagatcgaggtggttggcgactctaggatcaccgtaaggcttaaggtgctgcgatcgtgcttgtcaacttgtcaaaaaagttgccaacacagggtttacaaaaccgcgcggttaccacagtaaccttttcagtttttgaaatcacggtatgtcttgcggttaccacgtgattttcgtggtaactgcgcagttaccgcggtaaccaccttaccgcgggggtgcggtaaccgcgctaaaaacggtaagggaaaccctggtagtaagaaggctattccattggacaagttggtcatacttgccgggtatttgattgagggaatggaattgatctctcttttttttttttgagaaccgaattgatctctctagcgtttggttaggacttaggagacagttttgtcagtgaaaaatcggtatagcttcataccgcatcttgaagagattccgtacatcctccataaaaaagactcttagaatatctagaattatccatagaaattaatatttttgatggaggaagaggttggaaccagactatgttccatacctctatttcttctctatctctatctctactattataaaaattaaagatgtttttgtcaagattttggtaattgtcatccgaatccttttacgatttctagatctttacctatactttttttaaaataataataataataatgattatctactcattattctttcgtttgttatccgactctatctatatgggttcgcaatgcacacgtggtagatgtccgactcagtccgcgagaacatgatgggcgcgtgattgattcagaacgttgtagatgtaacgcgagattggcagctccctattttgtgatcgattttgctacatctcaatcgaaatattttttttcttatctctcacttgattttcccacttaaatatacagtgtattttcttgtaatttacagtgtaatttataaaacttacattgtaacttttgtaagttacagtgtaatttttgaatcttcgtatgtaagttttgaaatttatattgggtttggtctttttcttgaagatatggcaattagtatccattatggtgtttcttagttgctttttgtctttttgctgtgtctattggattttaatctaaagattaaaaatctgtgtgatatgatgtcatgggctttgggccgggaatcctagacccattggatagagttagggtttgttaggattagattaaggagtcctccatctatataagtagggatcctattccagattggcattagatcaaaatttatcttagtgcccatcggcctgccttctcagtgcgacaaagagcgtctcgccgtttacgttcaggaccgttccttgttatttcatttactataatccaatctatttcccttcgtcccttttcatcccaaataatcctaacacgtgataacttggtatcagagcttcggttccgtgcccatgggtgccgagatcgctgtggttctcaacattagcgaaggccttgccgagatctcgaagaagatgatggacttggtggcgcaactctaggccttggcagcccagtcagccgagccggcggccttccttgaggatgccgaatcatcatactggcatgtagcgtccttgcgaccacgagggcgcgtcttcaagcggcacggatggtggcagtaatcggcggtgacgccactccatggcaggccatcgccgacaacctcctttacgtcatttcgtcgaccatagggcgggatcggctgcaggttccatcggcgaccaactatggcgcaactgggtggtgcgctgctaggattagcatcggtgatgcctcttgcctccgccactcacgcatgcgcagcccagcccaccgtccggggtcgtcggcaatggcgttctgcaaccatgcgggggtggcgtgactcacggcgaggcgctcacgcttcctcgagcggcggcgcaagttccgagagtggcaggtacaatttggcgcgggaagatagcgacatacatgcggcgtgaattgcgggaacggcaggtgggcgagcaacctcggcctcgccgctgggcctagcgatggtgccgtcgctgttggcgccctcaacggagtcagagaagacgacggtgagttccacttcgatggcgacacaacacggcgacggttggagcagagccagccggcgtatggcggcgcgattcactagcgcgacgggtgggcgcggcattcgcttgtcgtgatggcgcagatcgcgccgggtccgcgagctggttcacgaagtttgcggctcgaccacggctgagtcgttcctggcggcatgtgcgcgttgagaactgtggacgcggcagttgtgcaaggacttcaagtcgaagttgggggcgatttcttttggcgtggcccaacttctcttctcgcggacggcgctcctcacgcgcatgttgttggaggcagcgctatctacgggaggagcaagggtttctcctcttttctcctcatctgggcaatttaaatgggctagactggtgggctgggcttcgatctgcagctgatccatgttggcctagatatgtttggattctggcatgggcctcactttcctttcaaggcttctgggtggggtccacctgtccatatctatgatgacaacataaaagtaaaagtagggttgttcacaacagtagtattaattatataggagtatatatttcagccgagatgtaaaaggcttgtgaatctttgtttaggctatggtactttgtttgagtctagcggggtgtgcctcgagctgcttaaaaagaggggagtaatgtcatgggctttgggccgggaatcctaggcctattggatagagttagggtttgttaggattagatagggtttgttaggattagattaaggagtcctccatctatataaggagggaccctattccagatcagttaggcattagatcaagatttatcttagtgcccatcggcctgccttctcagtgagacagagagcgtcgcgctgtttaggttcagaaccgtttcttgttatttcatctactataatccaatctatcctcattcatctcgattcatctccacataatcttagaccgtgacatatgatcataaaaatcttttgaaagatgcatggatactctcgatgaatacaaagcccatcttctcctcctacgtaacactgctccctacgttcagatttgtttgagtttaataaaaaaaatatgacttagataaaaaaattaaaccataatttaatatttagcgtaattttattttttttcccgttgcaacacacatgcatttagctagtctctactattataaaaattgaagatgtttttaccggtattttggtacgttatccgtgtatgagtcgctttttaagttcattatttgcatttggaaatacaaatccgtgtttgagtcggtatttgaattcgttcgcttttacaaataaagaaggagaaggagacgtataagaaatctcttttataaacttgcatactaacttgacatgatcaaacttataattgcagttcccaccgtgaattttaccttagttaaaccgttcaacaataatatgattaaattagccttcactcgttgctacatacgtgtattttttttcaagtcatctaataaaccaaacaagctgataatccatttttgcttttcagaaatatgctaattcaatttcttcttgtgccccaaccaagcactagctctgaggcgaggcaaagcttttgcctttcttttaaaaaaaacacccaagcactagctaaaaggtgttcacacgaagcaaaacatatcaaatactcctatctctcacaacgtagaataaggaaaaaaacactgtaaaaggtatggaatattcttaacttgttgcaaggaactgatcaaaagcataacctttttagccaaatgcatgatcatattgttgtccatttatactagtacaatcttaacaaacctgtaataaattttggacaaggaaaaaaatattatccatgaaatttgggtgttcattaccatgattgtgactttatgtcaacactgaaatcaaacttactaaattcaacattttctagatatatcgatctctttttagtataaaaaaatatagttacgtgcgtttataaggttgagtgtacgtatattgtgagcgcatacatgatttatatcatgtttcttattaaaaacagtaatcccaaccgttgatcaataaaccagatccttcaatccgaggagaagatgagcccttcccgttcggaatacagtacgtacatacgtatactccgtaacaaatcaggttaattaatttcctctctataagaaatataaaaaattccgcttaataattacctgatctggactacctgagcgacttggtctcgtctcctcgtcttctcgccgccgccgcgagcggaatccccctctctccgtctaaacctcgccgccgcggcgaagcaaaagcacctccctcttcgccgccgcccgccggcaatggcggggctgtcgctgcggtgcggcgactgcggcgtgctgctgcggagcgtggaggaggcgcaggcgcacgccgaggccaccaaccacgccaacttctccgagtccaccgaggccgtcctcaacctcgtctgcgccgcctgcggcaagccctgccgctcccagaccgtgagatccccccatccccctccccaccttccctttggttttcactttctcgatcgaattccgccggattcggtggttctcgatccgattttagtctcacctggttggttgtgtggatctctgatcttgcgcggcgcaggaggtggacctgcacaccaagcgcacgggccacacggagttcactgacaagaccatggaggcggccaagccaattgatctcgaggcggcgccgccgaagccggccggcgaggccatggatgtcgatgcctcggcaagcgccgagccacaaggtgaggtggttgttgttgagatgatcgaaagggttatgatctgtggccgcctttgggtggcaaagagtgttgaatcttggtggctttttgcttccggcagagatggtggcgccggaggttaacaaggagatgctggcggacctcgaggcgatggggttcacgacggcgcgtgccactagggcacttcatttttctggtatggtgtagcaagatagtatgtcttagttcaacatttgtaccatgctgtcaagttctttctccaacttagattttatttattagcaaattattactagagtactccctccttcccataaaaaaccgaatcttagtgtccagattcatccctaagattcggttttttatgggacagaggagtagactgcagatgcagtagaaaagtattaactgttcaagtgtatatatgttcgctcgtgcgactgagctatttgagactttgatctaagaaagtctcggctagaaggctttttatcacagtaaattctggaccaaggatttcagcatatggtgaataaaggaacgacctcgattggaaagtatatgctttgctattgagtcttgcagatcaaataatgctagtgcttgtgcattgcaacaagatacattatgagtgcaaaattagacatacattctgcattgtagtgcctgtggaccgaaatttacaatatgacagaaaaaacaaggcattatatatgcattgaaagctgaactatttgctgtgcttttggacaaaactgtctcagtggaccagaagtcaataagactacgttttgcagtcttacttatatattatgattgtctcatctatattagttaaataaacataacaccttcagtaagcaaaccatgattaattcataactttgtttgcacccatttaattttcctctaggtaatagcactattgaaggtgccattaactggctttccgagcaccaagaagatccagatattgacgaaccgcttctggtatgatgaatttatattttttgttgctgattaattgattatacctttatttgttttggtatgctggtgtgctaaattgccccttgctgaaaaaataatatgttttggatattaagtggttattttggtattattttcatcgtgcttgtgtagtgctacactgaattgcactgtctgacctctgacattctatccatggagtttcagtaatacccaaaacttttactatatttatttattatttgtgcagctcaatgtatttactgtaacaatgaaaacgcatttcaaacatttgaaaaattggcataggttgtccattttggttttttttcccctgcgtatgcccatgtatctaggaccaaacttgcacatttgaatatatctaacctcccacttcagaggttcaattaattgtgtccaatgggagtaatagatgaattctttctgtgttatacctatacttgtccagaaaatttttgctctccagtacataactttacacttaccttctttcatctctcaggtaccggctaatacaataactgaggctaataaaccctctttgtctcctgaggaaatgaagattaaagctcaggaattaaggtgtgttcatgaacttattgctttcttattatctttaatgagttgatggttttatatatatcttcagaaaattgcattgacttgtgtctgtctgtagcactaccttttcctcgttgaaatcagttcaattgacatttaagtacttgtatgctttgtcgtatgtggttgggctttgtaatcgcatgcattggtacgacaatttttttcactgctttaaaaatgataatttttattggacttgaaactcaatataaatgacaatagaattctcatatttaatccctgaagttctatacttttattacattccctacgtattttctttgcacatgataacccccaatatgcagattgtgcacttttttatcgtaccgccttaaacaggaactttgttcaatatttgctctccgtttgtcatattaacactggaacaaccacagatctggcgttatgattctgattttaactttttgttactaaactattgagtttactcactcgatttgtagggaacgtgctcgtaaaaagaaagaagaagaagagagaaggatggaaagagaaagggagaaggtttgttctcaacttctttttaccttatttaatgtatttagaaatgtatgaatcaagattacctgcagcacatttatatatctggtttcttctgtgcagttagatgtgtttttagtcagtatcttgcacagcatatccaaaaaagacatgcattatgcttagtcattacaatcaatagccctttatgatgtattttcatgtaactttgattccacctgccagcaatcttgtacaataacataacacaaatagtttgctggaacttattgattttgtttcatgaaatctcatctcaaatttgtcaatttgtatgaagaaatctgcataagattacttggaagtgcaattatgtctgaagtactgagctagtcttaaatttgttgctgtaatatgtagagttgaaggtatagatggtatctgctgttttcttttgtcacgttatcatgtctttacagggacttcagcctactgtcccctattttgatataagctgctggataagaagtgcaaattatactatatttttcatctgaaaatactgatgagagttgatatcaaagatgaaaattttctctcatttgtctccgttctactagacaacaagtacaaattacgctatgcccttcatttgaagataatgatgagcactaataccaaagcatgaaaatcattggttgttcccctcaaattccagttttatgtttgatgtgatgtgatcttggcattttccagttacacctttgcaatattataattttggtggatctttttccaatattacaattaatagcatattattgttccttacattatatgtggcatatatttctgttcattttttgccagtattttatcttacatattagacatttttaggaaaggattcggatcggtaaagagcttcttgaagccaaaagaattgaggaggataatgaaaggaaacggttggttctttgttccccttttgatttttctgtattttgactagtagtattctgttctccaccccttgactgtttttaccaccacctgcagcatgatagaactgcgaagacttgagaaagaagaggagaaaagagctagagaaaaaatccgtcagaaactggaagaggacaaggtttccatcttctccatctcatcatttcttctattatttatataagaatttctggcgttacatatttgcttcgacataacctggggatatttgtatggttgtcatgtaagtgtcacactctggcaattagacctcaattatttctttctaattaccaggctgaaaggagaaggaaacttggattgcccccggaagatccagctgctcctaaaccaagcgcaccacctccggttgaagagaagaaggtacacctatcgtaattagcagttgatccgaatttcctttcataattagcagttgatccaaatttagtcatttagaccaacctactgccagtttgaacttgcaccctgtactggtcttgagaacctgaattgcctaactgaaccaaatcgctgagatgaatgcgagcaaaaattttatctgattctgaatttctcaggaaacattcagatcttatgccttacatcagtcaatggatttcttgttggaacagcttttgtagaggcctttagatccgaacttagtaggccaaagaatataattgcagattgtataaataaacaatgttttgaaatcattattgccatctaactctgttctatggatttccagagggcattacctgtcaggccagccacaaaggccgagcgcatgagggattgcttaagaaatcttaagcagcagaacaaggtagcatgtagttttaacttgaaatcatcttctatgttactcatatttgtcaggcagattgacacatatccttcattgcatgtgaatacagatgcaactgtaaagacttgagaattctattgtttgttgaaactataccaaaaattgtgttctccctgtagttttagagtggaatcattcaatgctgatataatcatattatatgtttggtattcaatttgacccaattatgggccgtttttgcaacaggatgacgatgctaaagtgaagagggcttttcaaacactccttacctacattggcaatgtagctaaaaatcctgacgaggagaaattcaggaagatcagactgaccaacgctacatttcaggtgaaaataattactgtacatattgacctggtaaaatgatccgctgttatcctttcaagaacaacacgctacttataatctgtttcggtacaatgcaggagagggttggcaatctgcatggaggcatagagtttctccagctctgtggatttgagaaacttgaaggcaacgagttcttgttcttggcaagggacaaggttgacaaggccgtcctgaacactgctggagccgagctgaattctgctatcactaatcctttctttggagtcctttaaatcgtatagaatttccatgtacacttgaacctctctgtttcacctttgcttgaagcacaaatgcacagaaatattgatattgagcgaatgatctttcactgcgctcacttctggtcgccagattgcacgagatggaaggatcttggaaagaatttcccaatatatttcttccaacgattaaagcaataaaacataaatacccacatgaactttaagctttttcctaatttttctgcaacttagtttgacaggactcgagtcagcttcgtgcatgaacagttccatcgtatgcaattttcaagctgattgtagcctagctactgttgggtcctgatgctgcttgggcatgctccagtagagggagtcagtagggggattacagggtactagttaaaaatgagtatgtctaccaatctccatgtcttcgaattatgtccatatatttccaaatctgttgcatatttccaaatctgttgctcgatctggcatagtatttcagagccaagttataggttaatttgtattttgaaggccttatggcatcttcaatgttgacaatagaaggtaagcccgccttaaggtagatctcttaagcttaaggcacctacatgaattaaaaaaaatgtacacctaccttctctctccatacaatgtcgctccactctcttccacagtttttaaatgaaaaacatagaaaatttggagtatttaaatcctttggaaaaattctctttacttcccacttctttcctctgtttagtcttttatgggtttgatcaagtttataaaaaaattatcatatttccaacacaaaacaaacatattattaaaacatattcaatattacatttagtaaaactaatttggttttatagatattgctaaagttttctataaacttagtcaaaactaaacaagtttggctaaggacacggagagtattaaattttagtaagcaaaacagtactatctgctagcatggttcattcaacaaggggtagcatcatcttcgcgagttcatagtcgtcgtgagaagagtcaagtgacatgatagggtaaggtggtataaaatttctataaagagttctccatcatatattcatgggatcacttacaatctttcttccaaacaatttgccgatatatttctttcaatccctcggacaataatatataaattaaatatgtcatgatcacttaaggtattttcctaagttccctgtaaattcccaaaataatctggccgtagagatgtcgtcgtcgctgtcattttcatttattagcgatttcgtgggatgacgggactaaagatttactcacacgcatgagccgttcttctaagtgcaattttcacgtttccgtttactggccaatatatagttgaccacgaacctgattattcttcccccccccccctccctacgctacgcctccgcatttgcatcgtttttttttttgtggggggggggggggggggggaattgtgtttttaccctgttttgatggccttgtttttttaagtttgttcatttgaccctctttttcaaaaataataaagatcagacttgaccctattctctgaaggcaatctaacggcgttgttcatgacaaaaatattgtttatgcccttgctcatttgaccctacttttattatttttgtttatttatccaggtttgacaaagcggtgttatatttgagaaattttgatatgggtttgataaatttaacatacgtttgataaatttcgataattttgacataaatttgatatatttttgacaaagttaacttattcacagatttgataaattttttacaacactagcaaaaatatccatgcgttgcaacgggtgaataaattctaatgataatatacgtttttcatgcataatcatgtcaatgataatgtttgtattttaatgagcggcttatttttttataaacggcgcatttctttctaacagtttctttctagcatgttttttttttattttttttactgacgacaaaaaccatatttttctcccttttttgcttttcttttctcacgcattttttgcttgtttttttaattttctttttttgctttttttcccaatacatgagaatatatgacgaaataaaagccgtgtaatagatggcaaaaaatcgatggatcctatctgactcaagcgtccatcaatttagcgttttatctagaaaaaatacccgtgcgttgcaataggtaaaaatatattttatcctacgcactatactccctttaatgcccatgcgttttggaccaaacgaacgcacattccttccgtccttttcacctctagtcctagtatagtctgctatctccctctgctcggtctatctctctgtggctcagtccacaaatggagttgtaggcccaagtcgaacagtatcgtgtccgtaccattataaagccgatcctcccatcaaatccggtaatccgctcgagctcccatagtcttataccatgacagagccgatcctcccatcaaatacggtaatccgctcgagctcgcatagttccgtacccgtacgatgactaacgaagctgatcctctccatcaaatccggtcgaatctttctccatatccaaaattattgagggatttttatccacttgatctcgcttttcccttttttttatcaaaattaaagcaatcagcaaaactcgggataaaaaatgacgacgattaaatggttcatcaaaatcgaagcaatctgcaaaacttgagataaaaaaataaggatgattaaatggagattcaatctggtgaattaaagctgaatcgaaaggagaattcatagggaaaataatgagagagtagtgggaaatcggttattgcagtaagtaggaggagtaagcatatgaggaggaaaatcaacgtggcggcaacgctgggtttggcccgatgaaaaaaccgcaaaaaaaaatatagcgataaaagaaataaacagaaaaattggtgaaagaaaaaacggtgaaaagaaaatatgcaaaaaggggaaaagaaaacggacaaagaaaaccggaaaatgggtgaaagaaaataaaacggaaaaaaacaaaaaaaaagaaaacgaacaaaattagatgggaatcggatacggtagtttttttttattttcgccactttcttatggggaatcggacttttttattttaggtttttttctattttttatttagacggacgatggaagcacctcttattttttaagtagtatccgtgtgttgcaacgggtgaagactattttaatcttattattgttatatggtttagttaaaatgaaattcactgtgttaaattcgcttggatatatattttgttagaaaatcataagcagcaattaggagtccgatcgtattaaattagtatgcgagttttttaaagagatttcttatatgattccttctgtattttcaaaagcgaacgaattcaaaaactaactcaaatatggaattgtatttctaaaagcggaagaatttaaaaactaacccatacacgatgacgtaccaaagtaccatcaaaaacatcttggaaatcatgaactgtaattaggagtccgaacgtctcaaattagcatgcgaattttttaaagagatttcttatatgactccttttgtatttttaaaagcgagcgaatttaaaaaccaacccatacacggatgacgtaccaaggtaccggcaaaaacatcttgaaaatcatgagctgcaattaggagtccgatcgtctcaaattagcatgtgagttcttttaaagagaattcttatacgattccttctatattttcaaaagcgaacgaaattaaaaactaactcaattgcggatttgtatttccaaaagcgaacgaatttaaaactgacccatatacggatgacgtaccaaagtaccagtccaaaagcgaacatttaaaaaccgacccatatacagatgacgtaccaaaataccggcaaaaatattttcaatttttcgagaagtctttttcgagggagtcggactttttttaaggagtcggacgtttttttttctttttttagggttaagttttttttccttttttttgtcgccttctttttctcaacggggagtcggggagtcggacttttttaagactcgaacgcccttttatttttctttttttttgcgacagatttttttctcttctttttttttgttttttctctcctttttattttccatcgggggagtcggatttttttttatgttttttcgcttttttttatttaaacggtattttttctcggacattttttcccttttaagggatccgatcttttttttccaaggggaatcggactctttctgttttgtttttttttttcggtttttttatttattaaagggacgaaggaaacgtttcttaaaaattttaattttaagtagtaatatatatatataagtagaagtagatagtagatcaatctcaaactgtacaaatatccaagaaaaacacaaaacgtagttaaggtatccccgcaggcttaaaaaaaaaaaacccaggaggctaaccagatggagctcgatggccatctcccgcatgccgtcgctgctgcagctgagcagctcctacgcgccgccgcgggagcactcactcgcgtgtcgtcgtcggtgccgcacctacgcgtcgctgcaactcctgcatgccgccatttctgcacccgtgcactgtcgttgccgaagccctttcgtccgccactctcacatgccgccactgtagcacccgtatgccgccaccacagctcttgcgcgccgtcgccgccgaagccctctgtgtgcgccgcctccgcagctcgcgccaagcgctatctccgcagtccctaccgcgcggcgcccgccgttgcagccccgccgcgtgccaccaccgcaactcccgccgccaccgccacagccgaagccttctctgtgcgccgccaccgcagcccccaccgagcgtcgatgccgctggaccacagctcccatcacgagccgccgccgccgtcctcaccgtgcaccgcctccgccgaaccctagctatgccgccaagaaggcacgggatgagaaatttgaccgtggggtgagaaatttgaggattgatttagtgttcactgcttaggggtattttagtcagtttatattataaaatgattttttttgtctcctttaaaaaaaccctaatggtggagtggaaagagggtcggacggcagtttcgattttggaaagtagggtcaaatgagcaaagtttaaaaagtaaggtcaaattagtagttacacttcataacatggtcaaatgagcaattgtcccttgtgtgtgtggggatgttagtgttgttttgatgcagatacaatcaaatattttaagcagctttgggctctccaatatctctctctgcgactgcatataaaggtcatgtgtattctcaaaataacaaaccaatgatactccatccgtttcaaattacttaaaatatgtatcttttaccgttaacttttataaatccgtgtagtttaacatgagaattacatgttatgaaaattattttcatggtaaatctaaaaacctaaatcttataatgttgaacaatatgggtttacagaaatttatggttaaaaattaaaatgtttgacttatgagttatgtaaaacctatattgacaagtaatttgaaacagaggaagtattatatttgtaatttttttctcaagattctttcctaatagttatagactactccatctttttgtaaattactgtcctaatcgttttgacttatgagttactacaaatcgttttgactttttttagtcaaattttcaggtttgaccaaatttatagaaaaatatagatatattttcaatacaaaacaaatataatatcaaaatatattaaatgctaattttaacgaaactaatttggtgttgtaattattgctgttttttctgtaaatatgttcgagcttaaaaaggtttgacttataatatatataaaatggatagagtagcttgtaattttaatcaggcaacattatgaattactccacgccctttattaaataagggttgattggaaattttaaggatggttagaagtaagattgagtaaattagatgaataatactctacaagtccttatattttatatttttatattttagaacaaatcttaatttctataagtagccaactagccatatcttttatataaaaaaagtagtcatatcttgagctgaggaaatatagttaattagttaccgaaattttactctcgaggccgtgtctaacaagatgaactcacgaacttctgtgcattactgaccactagctacttgacctgatcgagcttgattaattgttcttaggccccatcattgatctgtccattagtttgaatcattattctcgtctggtttgtgacatgtgctgatttacagtcaaatattttaagctatcgttggctatccgtatctcgatcgatgtgttatagtgccttcataattcgatcgatgagtagaacatacggagtattactgaatgtttcaaaaatatattcatgagagtgatccagtgattcatcgattctgtgtggttgaaattttctcggtagggttggcgacactagtacgtcactcgatctcttccactttgcatcagtgttcaaacatgtatgaacctcggcacgactccatttaaaacacgtggtcaattttaacaaatttggcttagaatcttgaaaattggcaagctatttcaggtcattgttaaactgtggattatagcgaaggatgcaaaatagtagagctttactgtacttttgtattttggtgtctaaatcaacacaggaaatttccaaaactgaagcaaagctcactacatcgatcggaccaccaacaacatatatgcctaccattttgcttctacctccgtcccaaaataaatttatttttaagccttcttatttgaaaaatttaagaagaaaatttaaaaaaaatagtcacacacataaagtactattcatattttatcatccaataacaataaaatattaatcataaaatttttaaataagacgaaaaatcaaacgttgtatccaaatactgaaaaatgaactttttatgtgatagaggtagtatgccagtgagtctaagtagcttcctagggcggttaggcccctaggtccactagagttgtaaatatatagccagttaaccagcgtataaaatctactgaattataaaatctacttgaacttttgggttgaaccggctcctacatgggccaaaatctttccttatcgacttataactttgggttgaatggacacacaagaaaagttgttgattgaaatataaatgtgctgtccgtccttccacatcaatataagtttgaattgaattgactcattatattcttcctcactcatcaacttaatcttttgactaaactagctggtacatgtaactcaataacatctgtaggagtttggggagcatgtagttcgacagcaccaccaacgatgacacacacatgcatgactgcagtagcaagtcaccctacggtcgcaattgagttgcagctctcaacaattgaccacgttttggagatcgaagatcagttaagcgttggtttttgcctaacgttttggagatcataaatgtcatggagaaattttggtccagcatgaaaatgacagtttattaattaccggaagactttgtgctcgatttcgatcgtttcagtcatgtgtgtttttactggttaattatatattaagatgggttgacgatatagaaacgtgcaaattatcatgtttgtctgaaacgtatagtacataggaacacgtatgttgcacatcgtcgactcgtcgtcacgacatattaattatcacatgcttgtttgattttctggaagaattaaagtcccattacatttggacggtatacttcttttttcctcccctaaattaattagccaagacctagctctacctgggagctggggttaattataaggatgttttagccttggtttggtattatattgcattggttatgataactttgtttggtgaaaacgttttaacattgttatgtggtttgccaaattgaattgtttacgttctaatgtactttggtaaggataatattatttatggcatgaaactatcaaacaattgagagagggagagggagagagagagagagagacttaaaaacataatttatctaaccacaattcgatcaataaaacaatgatcatgaggtttaatttccatacatgcatgcaacttgaaaaaaatatggcataatcataaatccatttgacctctaaactcttcgctttgtctaaaactcatctccaaacttgaaaaccaaatatttgaaagctggaagggatcaaataccatgtcttagagcttaagggtgagtataatatcgaagaaaaaaaaaaggaaataacacggaacatctagttagttcatcgatacaatagaactactaggtagaatatgtgtgatatgtcttacctttttattcaagtgatcatctttttagaggagctaaggatttatcctatcactcaatatatttttgtcattctcaactttaacacttattgattctatgccagccagtagaggctaacggtgtaaactatttgagccccactacggtggtctctactggtaataggaaacaatttgaaccattgatctcatttaatagatggaaggatgcaaatctattcgtactaccaccacctcagttaacggtagtaaaaacatagagaggtactattgttaaaaaaagatgcgatagggtataattgtcattaagtagtgactacacttccttttctccttttttggctttttcgatggaatataaatgatgccagcgcaatataatgaccacagatcgatctaaacgggaaaaaacataatgttaaagttacccataattattatattaataaattactaatttatccttaatatggataaatcatttctattggtattataatactaccaatagaaaacacagtagtatcgttcaaactattttcattgttaaaaacaaaagaaatcatcccctctcttgcacatagcatgggttgttatagttgctaaataagttttactccagtaacaaacagacacgagaccaaaacacaagtaggagtagtacttctagtgcgcgcattataagcatgtcttctaacttgtcaacatcagccatgaatactaaaattaattaatccctaactgtgcgctgcggccttttgaactaatccacggatagcagatttaattctacaatgcatgcatgacagtatgacaccgactgatatattatagtttcagcttttcaatcacatgcatatatatatgacttaagtacactcctgtgtaattttccctgctatggcttgcattgaccaaacgaagacactgacaataaggaagtaaagcatttttctcatgtggaccacgtgctctaaattaacctgcataccactatgatcaagacccaaacccaggtatataagctgacgccaggtcagtctactcatatactccatccgttctaaaatataaggatttttactccctatatcttgaagcaaatcactttgtttagattaatgtcgtataaaagttgatttattttaggataacaattaggcgttgtttagcaaatattaagattatgtcaaaagattccttttgttcattttaattgtcaatttttaaattttgaatggctagagattccatttctaagcatctaattggctttcgaataatggggatcaatatagaaatgcttatattatagtaaaacatttgaattctagaaatgcttatatttttttaatagaggtagtatacataaaatttttagatatataacttgttgtaggctatttttctaggtttagaatatgtaatgtttgatttatcctatccatttataattatgacaatcccaacaggggcaaatgtgggcctaagcccccttggccaaacccttcatatattattgagttctagagaaaaaaagaatactagctagatataagaaacataatacataattgaaagataattatagtttttcatttttttcaaattagatgtttttagaaaatagattaaaacccggcctctacctccaaattaactaaattgaaggtacaaagccaaatattttttcaaatagatattcatatatatatatatatatatatgtgtgtgtgtgtgtgtgcgcgcgcgcgcgcgtgtgtatctattaaatttatcttacatttagtcttgttatagagattttccaccaaaagtccctcatggcatctgcatcaatctgatggggcacatatatagccgcattattgtaagcttgcataaaactttcagaaatgacagaaagaaaccaagattttcgaccaaataagcaatcaagtaacgacaacacaatcaagtgtttttacaatggtctctattagaaatcaatttagactgctcatatttgctagtttaatggattgtgtatatttatactaccacctcaactactagtagtagcatttttttttctactgatagtacgtaaaacttataaatcaacagttgaaatcagttctagtactcataatattcatcaccctagatagtattataatcatatccgttgagactaagaaagttgttataaaaaaatgagacacagtttcagtttctgagcaaaacaagaaaacaagacccaattaatgatgcagcctggaaccagctctggttaatttaaaaacctctagcaaggaaagtcagaggagaatccagcaaacacatagcatacggtaagttatagtagtagtttttttttttttgagaattagttatagtagtagtagttagctatatattggcatgcatgcaggctcaggtaacgtgctgtctctttctttgctttctacttagatcaagtcacgttacgttagagcacaggcaacctagattaggtcacaagtggagtagaaaataaagatgagctaaattaatgcgagtggacgatcagtaaagtcaagtagcacaaatcatcccaactgcatatagacaacaattaaaatacttagctcatttcaaaatatctatattttttactcaaagaaatatatatctatttgtttcggggtgtataaggggaaagcacagtaaccattttgaggtgtataaatataaaacagaaaaatgatgaatctgaactacttctttcaactgtcaatatatatatggaaaggttacattggagtgataatacctagattatttcattctttttaactaagggaagtatgtattaattgtatgtatacatattaatttttgtacatgtcatagtttctacacaccttgttaatggtgtaagcttatattttcaatggcttctaataaaatgtttagtttgaaaacacataaagctaagcatatataagtttgcattaaaaactacatctataaagaaacaaaattatggtaaaaatcgcacctcaaagacaagggaaaggtgaaaatgtcaaacaattttgaccgaaaagagtactaaagtaagtaaggttgtgttcattcatgcgagagaaagagataaagtgcatcgttttttatgcacacgctttccaagctactaaacggtgtgttttttttaaaaaaaaattttgtagaaaatttgctttaaaaatcatattaatctatttttcaagtttgaaataattaatactcaactagtcatgcattaatggctcagctcattttacgtatcttctcaattttcgtctttcttcttttatcaaacacagcctaagtacgcaatattgagtttgcatgcactaaactgatttcttgttaagttgcataatctaccaattaagaaatcaaactgagacaaggggccaataaagttcaacacaaatacaacaacaattgaaaatgaaacagggagagaattgcatacaggtacattcgcgaaactaaatttcaagatgacgccattgccaaattaattatgtactatatgcagtctgcttgaaaagtctatattctcatgataatggagttgtctccaaattaattttgcagactagaactctgccttccaaccaatcttttagtatctttcctttactaaaaaaaaaaaagcaaaccaattactcattaatttaacacctattacagttaaataaaaccagaaacattagcttggtctaaactaaactaaataaaaaagaaaaaaataaaatgatgaggggactttgaaggcttcaaataaaacaatggcgttgtctcattgtcaacggcaagaccttctccttcctcctctcttactacttatgagcgtatttgtatatataccacttgcgggtgctgcggaatggagcagaaatgtgccttctctgattgattttaaggtggttttggccctttgggtcctttcttgagggatttgcacaggcaagaccaccgttcaattttggtttcttccaagggagaagattgtggccgttttcttgagggggtttgatctttttgtggggagtggttttgtgttttcctgaagaaatttgagttctttctttttcttggagctgttctagcagtctaggtctcaagagtgaagcagcctgcttccactggctctcgggcgtttcagtttgctttctccccaaattttgcttctttcttgtgagaattgtagttttagtcttgccggagcttattctttttttgttaattcattttttttcttgtgagaattgtagtttttcaggaaatcttttggttcgatttgttctgttaaggaatccgagtgaaaagtgttgttttcaattttttttccttgtatttcttcaaacgaggaatcttgagtagttttcttttgaatgaaagataccttagtgtttgtttgccatatcgctacagttgattttggtagctctggatgattgggagagaaggtgcaatttgttagtgccttgtgagagaaatactattgattagcagttcttggacagaaaatcttgcatcctccagcaccagcagttttctcctactggatcagtgttcggatcaaacttgaagtggatgacgtcggtgagttgcttatttccgatttttgctcccggaattaaaatattcatgatgctggtattgaggattttggcttgtagcatgatgcaatttaattttacttgatgtttcttactccaccgacgattgatttagtagttacagaggaaagcaggggatcttattcatattggttagttaaaaccgatcacagtattgaaccaaacgatcttcttgttgctggggttttatttagaacacatatattattgcacaatagatctatgacagaaatttcaggtgtttgggaggtagtataatgtaattctggattacctcatgttcttgggttttttttttctttgtaaagaattcgacggatttattggcttgatatggatgaaaggcaaatggcacatccatgaatcatgatgacaagttgacaacacaggataatgataaaatcagggggtcgtaaaatagattgtgtatttattatcaaggagacaactgtttgcacatgcttcttaatgatagaatactggaatagtattgttctcatatcattttttttcccttttgttgttccagtaatttcccttcagacttttgttttctcaccgatttagtattgttagtttgttactactgataactcttcaaaaagttattcaacctatggggtatatacttatcaatttgaaatgtataattctataatcaactgtacatttttttagaatctgtgacaatgtatcagccatgatttggttagatgacaaatgtttgctaattcatttctccaaacagcaaggaggagttcctacattcgggaactggtcagccgcaggcgacaccccgtacacgcagaagtttgagaacctgagaaggagcaagaaaactgctaccggtgtttactccaacccaaatgaagtgatcactgaaacacctgatcagcctcctcctcctctcaggtcaccactgcatccatcctctcatgatgccctgaaccaaaggcagaggtatgaaagaaagcccgaaaccggccatccccggcctgccggatcgcctctccaccgcgaaaccgtggcgagacggcacgccaatccgctgcagcagcatcatctggaccatggtggctatggtggctcacccagaagcccttacagagaagttgcagctgctgctgctgcctctccaaggtccaggtacaggtcagctgggatgcagactccagataggaaggcctcttcatctgatggccgtgtcccagtgactccaggaaggagcaggttgaagcaaggaggcagaggctttgaacctgtacagttcttcacctcatctcgatctccatttgcaaattcagaaatgatgtgcacattgtgtgttagaggttttctgaataaagtgcatttgcattctgagttttttttctttttcaggctttagatgaagtgactgtacctccatttggtgattgggatgatgctaatgcggcatctggggagaagtacaccggcatttttaacagggttaggcgtgataagctgaccccaaactcttctgtcaagcagcaaccaccatcttctccttctggtggcagaagacaggaacataaagtgcaacaggtatctgtgtgctgtccctaactatacgacaaatcttttgtgacttatcccacataatccatatgggagcattactttgtagtatgattcttgctcaggttataagattacttatggagttatggtcaattttcccggcgactatggtgattttttcttggcatctttaggtgcatttgttttgtaatatgctagatttatgtgtacagatatatagcgaagtaacttaaagatgcattaggcagtccctcagtaagtaattctgctgtcccactaatggaatataataaggaccaatgaacatagtgaaaattttatatatcatggttttacttttcgattgcacttctggagttatgcattgtcccctgttctagttcaactctgtttctcacaaagccatgaattactatcgacactacaaaacatgcaaaaattcatttgaatatttgatcacccagaagtcataacagaggtatatacaagagatgcaaattgagttatgcagtttgtatatccatggaatgtttgacctttggctatgtacacctttgggtgtagatgccagaagtggtttgcttccattatctaaaaaagaaatgttttgcctaacaagtcttaatatttgatgctttcttatgtacttggcagattaaaatctgaacaatttcagttttctgcttttaaattcttttgattagttatatcattgggtctttcaaagtgataaactagattgatacaactgagttgggaaatctgaattcatcagcagaattttcagtgcaacactataatgaaaatgtaatcactgatctctttccctctcaggcctgctcatgctgcatcctgtgacgagattaagagctggacatcctgcactggacctgcccttttgttcttcttggtgacatataaaggcacatttgaatatttgaagagattcatataatggaaatactttgcctttgcttgaatataggtgcatagaaaatatagaatgcgatacaggtctgtaacatatatatatctaagtatataaatcagcttctacagtttccctttcctatcttggctttgtttctcagcatcctgcactagtccatgaagaatgctgatgatgttttacctgtaatctggcttttgattctcactcatgtatctatttatatcgtgtcactggcgacaattttcagtcataaatttgccagttgtaagatactttgtgagaaatgagtattgtcttcatgatgaagaaacttcagaaattcatggaggctaatgaagagtgatcaaagaaaccaacaccacatgcatgattttttttctttcatgtaccatatcaagttatcaacaaaggacaaagtatacacattttaatttgcaagatcacataacaattattagacttaaagctattttatgtctttctcagcaactggtgttgtcagattttctttctgtctaaacacaaacttgttactgtaataattaccaccgattcagtcagaatcagagctgcacctgacggccatggatccagctgaacggagcggcggcggcgggcggcgcccgcttcgccgcctcctgcgccctctcctccatcctcctgaacctcggcccgaggctgcagacgaagtcctgcgcgcgccgcccttcgccggaaagccccgcggcgaggccggggacgccccacctcgcgacgaggaactcgatgatcccggcgtagtcggcggcggtgtacacgccgaggcgctgcgcgacggcggcgaagcgggcgaagaggcggtcgtcggcgccgtcgtacatgaggcgcgccggcatggcgaccttgcggcgcatcatgcgggcgaaggccctgaccgtgtagtccgggtccacctcgaagagcttggcgacgatggcggcgtaggcggcctcgtggcgcttctcgtcggcggcgacggtgccgcagacgcgggccagggcggcgtcgccgtggcgccccgcgtggcgcgccgtgttgccgtgggagatggaggtggcgcgctcctggaacgtcgtgtagatgaaccccatgtacgggtcgttctccgttcgtggatccttgcaagttgcaaccaaaaccaagcaaacaacattgaattgaaatctagccaaacattttgggtgtgttgagtaaaactttctagatgcactgcagcgagtggtgtggttttaacctgaggtctcgggtttaattcttaacacgctcataatttaggtttgaaagatgtgtcagtgaacattttccatgtctaccacagttttatttgttaaaaaaatgtatgtataatttcttcttaaaaaatgtgtgagtgatcgcttttcatgtctaccacagtttcatttgttgaaagaaaaaaaaaagaccctttctcaactaacaaaacaaatgagctacaagagtactaactacggttctataataattgatgctttggacaaggttgaggtcaaacttttataactttgaccataaataactttaaaaatatttggtttaaagaaactaaaacaacatttatagatttatctttcaaagcactataataaaagtaaacatgcatttatttattgtatatattataatagaaaaataaggtcaaagatatatttcgtagaccgtgtcattatccaaaatgtcaattaaaatgaaaccggagggagtaaacaaatgaaccagaatgcctacgcaatattcgaactttttagggatcatgagaatttcacgaaattctaaccattagacatcacgatctaaattgaactgttcggataactcccctatttttcttatccccttctaccttgcttgctcaacctagtttgtttgaagaagcttctagtagaaataattctcccaaaatctctaactccttcaaacaatcatattcttacctagattctgaaaatatatatttatagaattcaaaaaacgactttgaaaactaaaactagaaaaaccaagtttttctatatttttataagctagctaccaacttacagcttctaagaattttaaaacacccgttaacaaggccctaccaacgacctgacaccattacatcaagatattgtctccgtcacctagcaccccactaccctttgtcacaaccggcatcacctcttgcgctaaagagacatgcaagaccatgacacccctctcctcatacctatatcctccctgtagccttatgttattgcttcttctccatcttctctagctctaatgttccatgtaactgcccttctccatcttttacggccgtcgacaccggaccactacataaccaactaattccttgacaccctcgctgcctccactatcctcctccccatacatggcttcggtgacgctattataacctcgcaacctctccactgctgatatccgctgttgtttctttatcattgtgatcgccctctaaataagggaactcctccaacttttcgatctcaaccctaaaacttaaccactttaaaggttacagggctttcacggatggatgtcagctaactaaaccacgaatcgcaaagcaaattgtagaggaaaaaaaatcacatgccgccaaatctcatctgaatgtcatgtcctattaacaaatctgtaaatgtaaaccagcaatcttatagtagtatatacaatatgtaatattccctccgttgtatatcgtaagttgctttgacttttatcttaatcaaactattttaagtttgaccaagtttataaaaaaatataataatatttttaacacaaaacaaacatattatcaatatatattcaacatcagatttaacatattcaatatcagattcaatggatgttattgatattggcatattgctaatattttctataatcttaattaaactttaaaaagtttaaatagaaaaagaaaatcaaagcgacttgtaaggtgaaacggagggagcaaatgcttaccatgccggagccaatgaggtactgtatcgtcttctcgacctgcctcatgtcgaccctgccggtgaggtagaggtacttgttcatcaggtcgccgtgccggttctcctcggcggcccacgccctggtccacacggcccaggcgctgccgccggcgccggtctcgtcgcgcaccccgccgtccatggtgttgagcatcgtctggtacgtggggagcgcctcctcggtgaccatgtcgccgacgaggcacaccaggtggtcgtcggggagccccgccgcgcgctcccgcagcgccgccacctcgtcgccgaacgacggcgagcgcgggtccgggaggtggtcctgcggctgccacgactcctccacgggcttgaggtaggggaggatggtgtccgccgcccacccctccagggagtcgaagacctccttcttctccggcggcagcgtgtgggtcacctggggtggcacctcgcgccacggggcgaagggcttcttgcctctcggggtggggttgccgatgccgccaactcttcaggttcagaggaggaagaatattcagaaatggcgactgtatggtcaagatgatatatgaaccgaatgttttgcatctggatatgtgggattggattgttgaaacatcagtgaattttacgataaattaaatgcagtacagatgatactaatcattgctcgcttcgttacatacttttagttgttttgactttttccattcaaacttcttttatgattgattaagtttataacaaatatagtaacatctacaataccaagttaattagttttatcaaaactaacattttatatattttgataatatatttgttttgggttggaaatattgttatagtttttttataaatttgattaaattttaaaagaaaatcgactagagaaaagtaaaaagcaacatatgatataaaacgaagtagaacgtacagaaatgatggcaacgaggtaatctttctgtaaataaatcattgtcatgttgagatcacggttttccaaactgctgagtccggggttaccgcgtcccggcggtaagcacggttaccacggtaaccgtgaaaaaccatgcaaaatttattttttaaatttatttgaatttaagcccagtaaccgtggcatttatattaccgtacccccacggtaaccgcgcagttaccggtggtaacgtaaaccctggttgagatgctaagcaagtactctcttcaaagcacggctgcatactactctgttaaaaaaaaagataaaccttagctatgaatctggatatgcatatgtccaggttcgtagctaggattagggtttttttttacgaaggggtacacttgcagtgaaaaggaactatatgagagagtaacacgtttttacttttttttttttgggtaagataagctggtcaaattatcacctaaattggcatgactaggctaaatatgaacatctgactccatctgtattttatttactaccttcatcctaaaataattatatttcaactaaatttcagacatatttaatgtggtgatccgaagcaattagctcacttgattagcattcacaaattaattggctgggttctacctttgtacaaatacaacttttttagaacaaaatttaaatggtagaaatacaattgtcttgaaacagaggtagtactttatattggccgtggaaatcaacagtaattgtgaaatctatttttttccccttctagaactaaattaaaggaaggtgtgccagtctgaaggcagtggcactttactgaactgtatctctaggacttcatgcttttcggatgctacaggcgggtgtcctgaacactagaagaactgtgacaaacaaactagcataatcaaacaaactacttcattcgtttcatattataagactttctagcattatccacattcattagtatctatataaatatagataatgctaaaaagtcttataatctaaaagtaggtagaacaagcgaacagtattttattttatctaggaaaggcgcataagaagaagtgaagaacttttttggttatataatgcaattgaccagtattattactagtgtacacatgaaaatataaaagaacagaaccaaacaataagaaggaaaacatgcaaaaaggaaaaagaaaagagagagaacagcttgaagctaaaaacgaccaatgcccctatgacgaacaaaggcgcaaggcaaccagtaaaaacgatcaagaaaaattcagaacgaaacaaaggatgacacaatgtagatgacgagatcaggggggcagttcaacaactatagcacgggcgaatggccgaaattgtttgaagtgaaactcccaatcaacaattttcaacatacaagatgaagaacatgcagcaaattaattaatccctttagcctaatcaaacccggcaaaattcgaggcgagatcaaggtcgacagaaaggaaaatgaaaatgaaatggatcaaagcgcaccctgccgtggacgccatcgccacgacaggagagacagaggctcctcctccactggttctcctcctcatcgagcatggcggccgaggagggaggcatcccgtgagagacatggccgccgctaccttccttcttcttcttcttctcttcttgcttgcacgcgcttgcagagtaagaggaatactgaatggactatagtgaagcagagtagaagaggagcagtattgcttctgtttttggcttcgacctgtcaggcaaattttctggttcacctgacttcgacatcctgtttgtcccggaggttccagaggtttccaattttacagatatactttctccgtttcatagtgtaagtcttttttttttcggggacacaatcattctaacactacccacatttatattgatgctaatgaatattatatatatatatatatgtatgtctagatttattagcatcaatgtgaacgtgagaaatactagaatgacttacattgtgaaacagagagagtactatccttttttttactgtctgctgtattgtcaagcacaggtcaactcggagagagcattctttcttttgatgttaaaaatctgtgctgtctaacattcgaaacgtttgaaaccgaaatgcttattaaaactaccacagttagtaccagatcgatcattgaaaaatatataccgctaaggtactgcaattcctacaaaattctacggtagacttgtagtattactatttgatgaatgaacaaacgtagctactatgaatttatgaagtgccaaatttgatgttcaaacggggaactgattagccagattattgggacggcatcactgaaatggtgtggcccgtggttacagtgcctgagaagctagaaatggtcaaccgtccgcctactgaaattggtgtggcccgtggttatctgctttcacgaagaacgcatgatgctgtcacatttatatatagggttcttctttgggaagaaagagatactctgattcataaaatagaagtcgtttttgatttatacactaataaagcagctcaaaggcagctaatacctttcattcaaacagaaagagtgtagatggtacagtatcattgtattgtacgctctgcagctgcacacttgaagggtgttctttttgttttttgcagaaagaaatttaacttatttttattgaactccactagcagtaaacttgcgtgaatggtacaagcagcccatggaaaaaattgaaagttagtcatttggatcctcaaaggctagaggatatgcagaaggcgttcaaatgaggtccaaggattcctcaagcaaacagaagcaagaacccacttttcatatggaaaaacagagcatcagaaatagcgaatgacaatgtttcagacaacaaggtttacatacagcaagagctgacaaatcttttctgacaattagcctctttgcccgccacaaacactacagttgcatatcagcctatcagctattcatcgtccagtacaacgacaacaaccatgtgaactacaactagcagtaaaatacatgaaacaaagtgcatcctggcacaacgctgcaatcgaatgaatgcagcataagcaccctggagcattatttgatatcaaaatacctgagcaaacgacactggaaatgagagttcaactctgattgtaagcagtaaatagtggtatcggatggcatcctacaaggatgatggtaaggcgatacaagccagaaagcatcaggctctgatggtcacactgcacagacataatcctggtggcttgagctcagatgtgaaccactctgatcccgttggtgcagcgggatcatacatcagtgtcttatagcagggctcttcatccagagagaacagcagcagcttcccatcatgtatgccgaaacaaaaacgagtactagaactacctgtgagtggcactgggactttctgccaagaattatcagccgggttgaagactgcgagtgacctctggttcttccactcgatgcagaagagctttttgtcaagaacagcatgggctgtgaccattacacaaccattcttcacctcaccccaggagttgtcattaggattgtacacgtcaacaaaacgcgtgttaccaattgtgaagcgcgaacgaccgcccatgacatacaatttgccttcaaagctgcacgcaaagcagccccaccttggacggcgaaggctctcaatcaatgtccacttattctgttctgcgtcataaacttcaacactagataaactatcaccattgggaccaaacccaccagcaacatatatcataccgttgacctctgcacaagcaaagtcacaacgagccacattcatcttagaaagctcaacccacctacaaataacacaaatgggtcagtccaatatttcgaaatatcaaaaccctggttattatcctgcatttgaacatttcatggtctgtaaataagtactgtttgtattcagattacaaggagcatgttaatataagccttaaagtcttcgcaaattgcaatgattgtctttaaattagcaaaatctattgtctgcgcatagacttattgatgcctatgaaaagccaacaatacctgtttaggcaagaatcgtatcggtaaacctcatcagaaacacactccttcccatgatcagcagcatagccagcaataacgaaaagctttccatctagaacaaccacaccaaaaccagctttggttggcccaggcatgggtggaagagggctgtgcttttgccctgaacaccccaaaacttcccaatgggacccctttgatccagcatcagcagtcaggacatacacccactcctcaagcttcccaacctctttccttacagcaatgaattccttactctcgaggaatgacatccacctcttggacactgaacccataacagggaactggctccgaggaacaagagcaagacatatctttgcgagatcttcaggtaagccaggtattagagcacagtatgcgtcggattctcctatgggcataaagccttgggaatatttcgcccttgttggagccttgagctgcatgccagcacaaagttgtgcctgtgactgagcaaaagaatctcttgtgccaacaagtgtaagcattgtacactcttgagagcgcaactcaatttttgcctccccttgttagccaacagaaatgaaaaactttggcttatctataagactttatctgctataaatgacagtgacccacaggaaacaattcatggaaaccgtcgcctatggggatggtaagagacaagggtttgaatgatgctgaaatgaggttcttcaactttgatgtctctgttttagtaattcttggtgcatcaaatgccatccgatactgagagactttggaatggtttttccttgaagggtcggaagtctccttactgttgaggtagaaacctttacctcccacacacatcgcacaattatctacagaaacaatgggaaacatatcaatatatttgctaaataagccaaaaaaatcataattaacaagcacaaatatgccagcgatatgcattacctatggccatataaattttgacgactgttagccagcagttccatccattttctgtgtttttaatcacctgcagtcaacactggagccttagcacaatcactgattcttatcaagcaggaattggaattcctaaaaattacatgatacttcttattaacccgaagtaataccagttcaaagagaaatacaatcactgaagtagtttttgtattggtaataaatagcaggagacataaatctgtaccgatcaaggaggagttgaaaaacagggctttgatatttgtgtggtgaccactgaccaaccacaatgtttggatctctagtctacaaatcagaagggataagaacaaacgttgccaggtgccaaaacaagcaacatgatagtgggtaaaaaaacccattgtgtgattccatcgaacaaattagcgggcatccgaatactgcgaattagtggacatccagtcaggggcgccacctatcatagagcttggggattcagccgaaccacccccaattctcctggaaacaaatagccacacctacccccaccaccaccaccacgcaggcacgaaccaaaccaatccgaaacaaaatgggcggactagacagagagaacagtctacgcttagatcgcccaaagcgattcaaaaagaagatcggagcaaagctctcgacacggtccgagaaagttggagtcaaatcaccacccaaaaaggaaaaaaaaaacaaatccgagccaccactgatggatctccgctctacgccggctgagaaatccggcggaggtggagggggcagggcagggcaggggagggataccttgggagcagcggaggcagtgtggggtggcgctccggcctcgtgatggggagggatcggacgagaggaaatcgggggaaaacaaatcgcccgcaagttggagtgcgcgtggggacgataggagaggagaggagggaggtggagaggtgggtgtctgatctctgacgtgttgtttatattgtactacccctgtggttttgttttcacactcggcagcaacgtggacaacgggccacaaatcattgctcactccttttgcaattcttttttcttgtaaagaaataagttatgttgacctcctcgtgcgcagcggcggattcacaatgggggcggactaccgtcctcgggacagtggagatcctcctaagctcccattaaatttttttccatagattcataggatatgggactggaggttcggtttatattgatgtagtttattcagcctcactactattttttttagatccgtccctacttgtgcgcctatctcacatgttgatagtgaggacttcaaaacgttatatagtagctgtataagaagtagaatcacatattaattttagtttggatcatacattcttaattattgaactaccactgatgcttccccaccattcaagaaatttgaacccatgtgttataatcgttgatttttttaaaaaaaataggtcaaatatgaaatatgataaaaaaaagagtagtttcattgatttctaagtggttgttcagattgtagctaaaataaactttacaaaattttggcaatattgccaaattgctaaaattttagcaggatttcttatctatttattaaagtttggccagaaaataatggatgaacatatttgacaactctaaaaaaaacgatatgatttgaaatgacatcaatctgagcaagccctaagtatgttttccacgttatcgtgtatgaaaacaaacagttttttaaaaggtttctaggtagactaatctcgtttatattaattaatttaattaactttgtatagtcattataaaaatccttttatctttcactaaccaccggccatttcacttgaataaatgccccaccctttgttaacaaactaattcataaagtaaagggaattaaaatagttgctacaagagagtgtcaacttgttagatttctgatgatgaaacctgctatcatgatttaaattttagacttgacaaggatgtttacatttaccactagttgtaaatatatctgtcgataacaaggtatctatagtgacttcgtgaatctcaaggtatgtcagtctagtcctcgaatgtctctcgaatctcaagatatgtctgctatattttttaaggtacagccatggcgactccatgaatctcaaaatatattggcatgtcctcataaagttaaggtgtacgtgtaggcgttcgtagggcctggttcttggaggcatttataggggtaggatgttatcagggttatggatacacacatacccaatagtaatcgactaaactcggcgagaccaccatataccaagtcttatacggaatcatatctcttatatagaaggagttccggataaaaaattacaaaaagagttctattggaaactataaggactactcggattatatccatattgttctccctagttctacttggacaagggtacatctatgggtataaatacaagacctcataagaggagaggggacgtggacaccaatgcacgcctccaaatattgatattagagataatcctagatatacccaatctggcgcctacagaggccaataagaggaatttagcactatctctgatctcgacgagtacatattcaaggagaaagactaccccgtcgtcaactacgtgttggttttccatgccgccaagtcaacgatgactaaataggttatcctaaatgctgtacttgtttgattatgatgaataagagcaacaccggcttcggccaatagaagtagggctattacctgattctgatgaataaggggcccgaagttgtataaaaatccttgtctctgcctcttttatctcaatctcgcatataccatgttaccaatgatccccatatcatgcaaataccgtagtcgtgatctaaaatgtcaacagatgtgtgtgcgcgtgttatatatgggtgagtgtacacacatttatatgatgtatgcgtctgtattgtgtttcgtaaaggaaacaatatagtacactactacactaactatttttccgtgcggtcgaaactcattttcacgtgcggttgtttcgcccgtctgtaatgaagggtctgcgaaaatcgcgatttttgcatgcgggtacctcacccgcacgcgggcagccgcttgcatgggaaaataaaaagatgaaacaaaagaaaaatcaaaaccaaaaccccaaatccaaccgccgccgccgccctagccgaggcccgctgccgccgcccactcccgtcgccggcggtctcccagacgccggatccgccgcctgctcccgttgccgacgccggctgaagacccccatcggcgccgccgctcccggcctccgcgccgcccaccgcccgccgccaacgcccctaccctccactggatctggggagggaaggaaggggaagggaggggagccggatcccgcgcggggggagggtggccggctgccggatccgtgcggggacagccgccgcccgcggatcccacgcctccactgccgccgcgtggaagaggccgtcgcgcgccgccgtcgctgtcgccgctcccggcttccgtgctgcccgcctcctgtcggcctccgcgccacgcgtcgtcgtcaccgtggtccgccgccgaggagagaggagtgaggagtgaggagaggagaggaagcatgagagagagagaggactgaggcgtgagagagaggaacgcacgtgagtgaggggacttagctgagcggataaaggagaggagagaaaaagggaaatttttaaagttcctgtgcggacctattaagagagccgcataggaaaatcggctcattttcgcgagccgattttcctgtgtggaccgagttaccgtccgcacgcaatttaaaagggtagctgtccaagaaaatcgtttgtgcagtagtggtagaaagctcatacaattttttataaggttttaaataatttagaaggttaaaagtcatacaaattaaaacgtgtttcagcccacatggagggataaccgcttgctacgtacggcgtatccgagtcaccagcttcagctcgcagcatcaataagtggtaagacaatataagccagtagaccagttatatatatctcctgacgtgtaagtgattagtgtgatatgcatgacagaataagataactgtcagtgttccattattcaaagtgtcatcaagccgcattatcggtagcaatttgtctccaaacaagcgcccatggtaacttgaaacccagctgccttcgattgtgaggtttgatattttcaacaagctagtagatcgtaggctctagaggatgtagctatcgcatagagaaaagactgattattctgagatatgcttatcatgctttgacgagagcacacagaaagctgatcaagtgatcatcccgtcagacctttcttttttagcttgtggttacttcatagattatcatttatatatgtcatgctttaaattggaaatatccaaaaatatgtatgccaaatataattatagtaaaaatatagtgtagttacatcacattatatgtaaaattgtatgttggagcatctgctataaatagggctatatgattgtatagaaatgatatggtttttataaatcaccatctatatcctgtatgtaggttcttttcaaggcaacatactagctctgatgttgggttcaactactaaagtgtgttgaagaaatcaagtcagtgaaagctgcatgtcgtaatcttaagtcaatggttatcagctactcgctaactttggatgtagattcacaaatagaattattcaaaatttttgtgatttttttatgttgtgtgagtttttattagtttgtgtgtgcttttgtttatttaggtatgagtttttgttgaattggtgtaataattggctgtagctatttaagcaaaggccgggattatattccattatctggaaaaaaaagtaaattgtatgtaagttaaaaattgagctggctgccctggtacacatggtttaaggtcgtgggtttcattccccgctcgctgctgcttcactattgttttatagcacgaatcccgggctatagaatgtcaagaaaccgacatatattttttttcgcaataatatgccgccatctttttttgcaactccgttctaaatgacgtttcttttttactttcttcatcaatgttgctttaggtaacttttttacgctacttgttatttataatatataatatatttgttatatgcaattgtccaaaatccacttgatcatctaaaaaatttaagaacgggcagtatatctactactagctcaacactacggttaagttctaatagcaactcgaaacggctacttgatttgttattctccatgagcacgttttgtaatctacattaaacaatacaattcatgcatgcaaaagttttctatataagtttcctaaaaatcaaataaatttatttttaaatttatggaaatgctacagaacggtatcccgttcgaacgggatgatacctgggtattagccgataccaaataggtatcatgtaataccttcccgtccgaacaagatatcagctgatacctaccacgtatagggatggatagaaagctcgtggctcgttagctcgctcgactcgtgacatgctcggctcggctcgtttgaatttcctaacgagttgagctggcattttagctcgttagagataaagaaccagctcgagctagctcgcgagctttaacgagctaggactccatcagacatccgcaaagacccagcccaatacaaaagaaagacccaagcccaagacaaatagacaacagcaaaagtgcaagcaaaaccctagtcctcctcggtcctactcctcactcctcatccaccgcacgtggcacggccgcaccacacgacacatcgccagttcgccaccaccagccgctagggccactgccgccgcctcactgcgctgacggagctgggtgatctgcggcgggaggggaagacgacgcgacggcgtttcgggcacaagctccagttgcttcaagctcctccaccacaagcttcagtcgctcgccgcggcgacgggaggagaagacgacgcggcggcgttcggggtctcctgccgcgtggccttctccacggcgtcgcctccaaggacctccaagtcgaccccaactcctccctttccgtccgcatcttcctccccacctcgccaccgcacccgcacagcctagggctccgcccgtgccgcgccagcaagccaccgcccaccaccaccatcgccagccgccaggtccctcctcttctgccggctggatggtttggatgggttggctcgcgagcctaacgagctagctcgagctttcaaacgagccgagccgagccagctcgttatcctaacgagcttgaccgagccgagtcgagccggctcgctatccacccctaactacgtatcgggcgatatctcagaggtatcatcccattcaaacgggatacaaatcccgaatgaactgccgtcccgtactcaccctaaaactaacaaaatgttatcaatcaaaacattttaaggcgaatgaaagaactttgctcgattctataaaaaacaataccatatatcctatggttacacttcaaaatatactacccagttaaaatctcttttgtattttaggaggaagaaattaccccatatcacgcgatgtagatcactctcatgcggaattaacagcacaggatgtctggatggatccgttgagcaaagcaggtagcgtgcgtgtgacggcgttgatcccctgcctagccactgggtcatcaggatattagatacgcccgtatgcccacgacgatatcagcacaaagcaagttgatatgttgggtagttgtagtagtagtagaaaccaggtgcgtctgcctactagttcagtgctaccatatcatgggtctatctggaaaacccagcttttacagattctcagaaattggctaccaactagttgcgtctcaaatcttataagctcccccaaacagaccccatatcactcttatctaaggaaggtcacaaccaggggacgtactgatcgagcttcaatactcaatagccgtggctccaatctttcctgccgttccaatcggattcgtcatccatattggattggtttcaatatattctttccttcgtgtgatctctgaaactggtcaaagatttggcccaagattcatccactctcaatcatataattcatattcgtgggttgcgtggttccgatcacggagagcagtatattatagccatacatatgtattctcttcgtcgttacggggttgggaccgtatgtgtggcactactagaaaaccaattttcccaagcggccaaaacttattttcgcaggtgagagagaggtccgcctgcaatacaacgactgtgaaaatcgatgattttcgcagtcgaggcaacagcccgcctgccaaaatgcaaaaaaacgaacgaaaaaaaaatcgccgcaccgccgccgcccccctcccccggccggatctgagaggggaggggaggggagccgccgccgccgctgcttcacgccgtcgtcgccgccgtcggccttcccccttcctcctccggctagatctgcgagggagggagagaggggagacgccgccggctggcctgtgccgcaccacgggcgccgtcgccgccgtcgcccccgccggcctcccccctccctcctccggccagatctaggagggagggggcgaggggagacgccgccggccgccccgcgccgtcgtcgctgccgtcgcccccgccggcctcccccctccctcctccggccagatctgggagggagggggcgaggggagacgccgccggccgcgcgccccgcgccgccccgcgcgcatcgtcgccgccgccgccgccggagatgagaggagaggagagccagtgagggagaggagaggagaggagaggagactgagtcagtggagggagagggagagagagagagagttgagtggtgggaggggtgggaggagaagataagggtggtttttttttttgggtatgtacgatttttgcagtcggagcacataaggttcgcctgcgaaaatctattttcgcatgtgccgcttaagtagtccgccagcgaaaatgattttcgtaggtgccgtttaagtggacagcgaacttcaccccgatttatatttttgtaggcggttatttggttataagaatcatgtccgcctgcgaaaaaaagacccttacgttgggaaaaatgtgttttctagtagtgtggttagttgtagatagttgcgaagacataaagatttttaaatctgaacataacttaactatatcaaccatttcttatagaaattatattgttaatccttttaactgttaaaattttaatgaaacatttgacggtaagtctggacggttaatcgtgctagccgagcggagccgtgatggctattttaagaggaggcattataagaagatgaagatggaactgttacgggaaaaaaagaagcaaagtggaatagagtagcatcattttcacataatggcttcggtagattcatccattttactcctctgtttttttttctctctgtttgtttgatgagaatttcatggatggttggaaataactggcgaattgaagcccgtacttgctggaggaggagaacctggggggaggcattgtgtatctgtgtggtgactgttgaggaaggggaaatgtggtccacggcgcatacgcgtttgagatgagacgagagagagagagagggtgatcagcgttatgggtgtgttcggcacccaagtttcccaaccactctccatcttttttcgcgcgcacgtttttcaaattgctaaatggtgtattttttttaagtttctatacaaaagttgcttaaaaatcaaattaatcctttttgaaaagaaatttatctaatacttaattaattacgcactaatggatcgctccgttttccgtgcgggagagattatttcccatccacggaatccgaacacagccacgctatatggaagatatgaattggcaaactgcggatagtgaatactccagctgctaagagcacccacaatgataaagtaaggtgctctctataaaacatgtatatctcagcaatagactagattaatagtaaaccacctcaatagtatgtctacatgggtatctatagctctctaatgcattgcctcgtttttctctatagactatctccagattagtagatagttttgcgctctctctctcttcatttaatctcttccaagtaggaagatatgctaacatggatctcttgtaaagagtctatagataaccattgcgggtgccctaagagcacccgcagtgttaaagtaaggtgctctttataaaacatgatcttagcaatagactagattaatagtaaaacatctcaatagtatgtctacatgggtttctacaattctctaatccattatctcgtttttctctatatactatcttcaggttagtaaatagctttactctctttctttatttaatctcttccaaatagaaaaatatgttgacatggatcttttataaagagcttatagataactattacgggtgccctaagcaaagatggatcacgcaatcaacctcgcgtttagtgagtacacgctgataacctttcctgcttgtctcgatcccagcctagaaaaaaaaattaatctcgccatcgggcccagtccatggaacgatgttcctcagaggatggaaaactaactaactcatttgcacataattaattaaatatcagtttaaaattttttaaatgttttaatatgattttttaaagtgattatttatgtatttcttttaaaaaacagtactgtataacagcatttcagaaaatatatgcgtgtaaaataaaagggcagaaagatggaactcttgcgaagtagtgtctcatcacgcactgcacgcggtacccacaccaaacacacagtggaactagaaaacggccacgaaaaaataataacctaaataattcccgacaattttggttctcatcgtttggcttattaagtcaaacgacatatttacaaacgaaacataatttgtgaataaaacttttatatatgtgttcttagcgatataaaaacaaagactgaaaaataaactccgatgaaaaaaatctcaaaatcaactttaaatttaagattaaaaatttaaattttagctgataagtataggtataaacgaaaagatggagctgttctttccttatagctagctccacctaacatatatatatacgccgctttcctgccagtgccacacctcacctttttcttacgagaaacgtgcgagcgagcgagcgttgatccaatgttttcccctgcgacacatacgcgtaccacaccaaccgatctttcaacacagcatgtaagcaatcgactagtgcgatgagcaagcgcctgggagatggtagtacgtttctcccagtccgtagctagctaggctcatgacacacacagtgcgtgcagtagtatgccggtgggcggccgaggtgcgtgtagtcataggtcgaactcggaccacaaactgatacagcattaagtttacagcaacaaataaatcgaataaagtcaataaatcatgtataaagtgatagatattgtatagagatatgtcggctaagacagaagattagacctaaccgagataatcccaactaaacacgatgtgtcgacgggggatacccgtagaccggatataaagggtactggggtacgctggtacgaggatctacgtaatacgacatcaggcaaacagaaaacaaaaattatactggttcaggccccttgataggtaatagccctaattcagttgatatgggattatatgatggaaaccacatattacaaagggaatagcggaactcgatgataccgacgagatcataatcgaacatgttcgattagatctcccggcgacttggctcctgtaggcttcaactccgtaggctgtggtggatgtgttggctatgagattcgatgccttaggtcctcccgggggttccttttatatcgcaggtcaactggtcttcaagtaggactcggagacatcggacccgacacgatacaatgacgacccagttccgtacgagtaggactccttccatctgtgaactccgtgatgaatttccttaacgtatgccgaaaacgtccgtatacgcgcaagtataccatatcgatatgtgacatatatcgaagggtagagggtataccttacccataaccctgacacgatgcaactaaagatagaattgaaatatcgggtaagcaaatataccaattgaactatagcaatccaagatattgaagcgatgcagtcttgaacaacaccaatataaccgataacagagccagtggaacttaggacttatcccttcgccggagatcgaaacgatgcagccggtgataaaaacctcggaacagagggtggtgatgtgccaaaagttgtattgatcgagagatagtttacaataaccccagtgtacatatttatgcccataggctgtttagagtcctgattcgacactaaacacactttcttaaatattaaaaggaaaattagtaagccctgcctaattaatagataaatcaagctgccgtgtgtcttcacgattaattcttgaacttgatctcttttagataaagttttcattggctgattgtattctttacatatccaaatccgctaaagaatattactaaatttggtgttaacagttgtattcgattttgcggttcggagacgacatttaaactcagcgacaaatggagggacctaaaagtgaacttaacctaaaaagatgacatgtaggtgacataccaggcccaaggcccgagcctcaaaggccccttttcatgtaggaataagtctgttttgcctccctctactcatgcccctagttgaatcactccctgagcggtttcgtaggcggtttcatcagatgtgatagttgattcgctgagtcataggtgggacgcatttgtcggcagcctccacctcatctctctctctctctctctctcatctcttcctcttctctcgtcttccataagcacagaggcagggcggcaacaacggctgtgcggggggaggaccttgccaactgtgctgcgggcggggggaggtgctcgccggccggagcgccgtgcgcgggggaggcgctcgctcgccggccagagcgccgtgcgcgggggaggacctcgccggctggccgcgctgcgcgcagggtaggacctctctgggccaatatgtatttttattgttttgctcactgacatgtgggtcctatttatgtttgttttatttttatgccacacaagcaccacgttgatgccacattggatgaagacaagtcaacccgccatataagcggcacataggacaaaaccgcctccaaaaccgtccggggagttgatttgcaaacggtttcgagagttaggggatgtcttatacctggttttgcggttgaggggtgtgattcaatcaggggcatgagttgaggaaggaaaaatggacttattccttttctgcacctaaaaaaaatggaaccaagaaaaggaaaaagttcactttgggtccctcaaatttgtcaccgagttcaaaattcatgcctagaccacaaaactggatataatgcatcccccaacttacaaaaccaatgctaacgaggtccatcggcaacattatctccggttttggctgatgtggcacctacgtgactcctttgattaggtcttcgtttcacgtggcattgacgtgacgcttacgtggcaattgaatcccaaaaaataataaaaccagtgggcccacatgtcatcctcactacccttgtctttctatcctctctccgccctttctctctatccgctctctctttctctccccgatcagtggaatagggtgggtagtggctggagcaggcgacgggcaggacgggcagtggctagagcagcagtgggcggagtaggctggcaaagcggagcgggatgtcaacggggcggggcagaggggaggagtggggcgacaggtggtgacgggacagagcacaggggcggagcgaggcagtggcacggagcgggcggagcggcgatgggtggagcagagcggctctgcccacttgggtctcagtcgtcgtcgtcatcgtccttcgacttctatccccacacccctgcaactacgaccccaaatctctcgacatgtcggagaagaagcgttgtggtggggcaggcgcgaccacgtcatgctccgcctctaagaagccgcgggcctccacggatgcgtcctacgccgagtcacttcgctcaaagctctgccctgacgcctccatcctcgccacccttcgctccctggcctctgcctgctccaaatccaagctcacggggttgtcaccatccgccggggtttctccttcgcggtgccctccaactaggtctacctttccgaacctcaattgcagtgcgttcgtccaagcgtgagtccacgaggccctttgccaacgtcaccatcgcgcggagggccaccatcaccatgcacgtcctctccctagtccacgccgaccaggcgtagtccgacgctgtcctcgacgacatctcctatatgcttgtctgtacccgctcctccttccacgccatcgcgttcgagaaggacgtcgttgtcgcgcgcctcacctttgccgacgatagcaaccggatcgactacacgtgcatgggtgtgcgggaaggccatccaacacaacatcaacagggtgttgggcatcaagagcgtcgcgctatccatcttgctggtggagaatgacgctgcgttcatgcggcctccgcccgccctgctcctgcccgcccgtcgctcgctccggccactgtccgccccgctccaatgcccggagagagaggatagagagaagaggggagtagtgaggatgacaggtggggccacgtggggaaaccttttattattattgtgtatgtaaaactgacatgtgggcccatatgctttattgtttttccggacccaattgtcactaagtgacacgtcaacaccacgtacgatgaagaaccagtcaaagtcaaaggagccacgcagacgtcaagtcagccaaaaccaggtacaatattattgaaggacctcttttacacggtttattaagttggaggatgttttatatctagttgagagatatatttaagactgagacccaagaagaatagaagaagacgcaacatgggtagggggcaacacgccggccggccactgctggtggtagtggagcagtggtcgtcggtccactgtacacgaccttggggcatggctcccccggccgtccaactccaaccccaaccccaaaagataaaaaatcatcgccactgttgagcgttgagctcgccttctcagtccaccaccagtgcgaccggtcggacacgcgacccgacccgacccgacgattcggcgatccaagccagccaacaccaagcactagcacactagcagtcaaagcagagaaggcaactaggcaaagcagcgtaacacccaagttacctccgctcccctccccaccgaatccccccgattggtcggcgatgtcggcggcgcccccgcctccccccccggagtccccggtcgccgccgccgccggcggaggcgacaaggtgctcgccgcggcgcagcacatcgtcaagtcgctggcgacatccaagaacgccgccgacgacatgatccgcatcctctcgggcttcgacaaccgcctctcccagatcacctccgacctcttcccctcccccgacctcgccgctgactccgacgaacgggggaaccccctgtgggggcagatctcggccgcggccttcgacgccgccgagcagctcatccaggtctgggacggcaccccggaggcgctcgtcttcgaggccaccgaggacgaggtcgccgagtacctctccgcggtcgacgtggccatcgagcacctcgcgcgcggcagcggcggcggcgccggcggcgcggggtcctcctcctcctccaccgcgggccgcgccggggtcgccgtgcagctcgccatggcgcgcctcgaggaggagctgcgccacctcatggtccgccacgccgtgccgctcgaccccacgggcctcttcttctccctgcgccgcctctcgctcggctccatggacgacctcgacacctcctccgagttcgacgccgccacgccgcacagcatcgacgtcgcgccggagaccgcgcgcggcgggcccctggtcaaccccttcgaggaccaggtgttcgaccccgtgcgccctgaggccgtcgacgacctccgcgccatcgccgaccggatggcgcgcgccgggtactcgcgcgagctcgccgacgcgtactgcggcatccgccgtgacctgctcgacgagtacctctccgcgctcggcgtcgagcgcctcagcattgacgaggtgcagcgcatcgagtggaagcacctgaatgacaagatgaagaagtgggtgcaggcggtcaagacggtcgtgcgtgtcctgctcgctggtgagcgacgcctctgcgatcaggtgctcagtgtgtccgatgagctcagggaggagtgcttcatcgaatcaaccaaaggttgtattatgcagattctcagctttggggatgctgtggctgtgtgtccccgctcgccagagaagctctcgcggattcttgacatgtatgaggcacttgcagaggtgatccctgagatgaaggatttgtgcttgggcagttctggggatggtgtgatcagcgatgttcaggcgaatcttgataggcttggggatgccattaggggtacacttttcgagtttgggaaggttttgcagctggagtcatcacggagggcaatgacagctggtgagatccaccccatgacacgctacgtcatgaactatttgaggcttctggttgtttacagcgacacacttgatgccctcttggatgacaatgccgatgaccaaattgatttggcaagagctgaggatcaggatcaggaacacttggagagcatgacccctcttggaaagcgccttttgaagctgatatcttatttggaggctaacttggaggaaaaatctaagctgtatgaagatagcgccctggagtgcatattttccatgaacaatttgctgtacattgttcaaaaggtgagggactctgagctcggcaagattttaggtgatcactgggtaaaaaggcgtaatggcaagatccggcagtattcaaagagctacctaaggatttcctggatgaaggttttatcttttctgaaggatgatggacatggaagtgggagcggcagcagcagcggcagtggcagtgggcattcaagttctcggatgtccatcaaggagaagttcaagaacttcaacctggcctttgaggaaatatacaggaaccaaacaacctggaaagttccagatcctcagctccgagaagagctgaaaatatccatatctgaaaatgttattccggcatatcgtgcttttttgggaagatatggtagccaagtggatgggggaagaaattcagggaaatatataaaatacaccccagaggacttggaaagtcagctttctgatttgtttgagggtgcaccggggccagccaaccactctagaagaagaacatagttcatatttggcaagccctgttaaaggtatgattttgtccaaggattgtaaattgctttacacttctttcatgtgtgttcttgctacctttagtagtcattgcaacaccataatacaatacaaggacctttcgttatgcacactgttgcaaggtgtgtactaaggaatattgtacatgtgttgtttctgttctatctcttgctgtttttttctgggtgttagctcttctagattttcagtactatttaacacatcaaaaggcccaagaacttgttcaattgggtagagttgggtttaccattactagtgcagccatttaggaataacctattaagggttatgaagaaatatgatgttcagtagcattggaagaaactccatgctaaagtatgcaccacaacccgagactttgtcggtcgaattttactgttacaaaatttatgttcctgtaaacttatttaatattatatatataacactgatactgcaaccacaggcttaaaagtgtcctttaatgatttgaacattaaaactacttgactgtaatgagcttgaaaataaacctttttgcttatttgttctcctaaagtttgccgtcttccttatggttatttagaacttagaatcttctctagcaatagcttatgaataagcacgtttcttggcaaacaatgaaatatcaatggtccctgttaacagtacactcaatgctgaaacctcttgttctctaaagcttggtttgcacacctgaattcatgtatattaggcttttgacattcaagtatcgtactcagcatagcacacctgaattcatgagtgcattccacaaacaatgtaaattactcgtcctttggtatctgatttcccttgtagatgttgctcaagtaaaatatttgaatgaaattggagtgcatgttcatgtcctcatacctgctccaggagatagtgagatactgattgtagttatgctgttcatagttcatacttacaaactagtattcatataaagaacaggcactacacgttgttttttcattagtacacactgtactactagtgtgtggatcatctatctctgctttgcgcctctgctaattttttgaggttttgtatttatattaccactaggtgaaatttttgttcctgttaaaacagcaaattccaccaatgtttttttaaacagtattgacaagtatgattcccttgcatcattatctcttaattgtttgatgtcaaagcatcactaattaagtttaattgttttctaatcacattatgtacactaaaatttacaacattgaatattgtaaatggacctttgtgtggagagaaggaaaatatgtgtcagttggagctaaattctacaaaaatctgaataatggtcgaagttcctgaaatgtttcccaacccttgatagcaggtaccccaaaagcaatcataatctgaaatttggatacgataatatgacatgtcatgtctgcaggataaatgtagaaacttattagtaccaggtaaacaaaagtgattgaatgaatgcacatttcaagtagctacttagctaagatccgagacatacatcttttggaatcatgtgaatagcacttatcgaaatcgacaaaatgagattaaaaaaaagggaagatctgctatgcaaatgatactgggggtcccaatgaatacgtgctataattattgacacattgattgataatttcatatgccatggcttaccaatgcaaattctacatgtacagttattttttctgagggtgggaattgggaacaattggctagtgtactcttgtaaggtcttacaacagtggaaaatcaacaaaagaaaaaaagaaaacagatttatgggaattgaactctagtaactagagagcaaaggtgcaacatctgagcttggctatcgttgggctttcttacatcatatgatgttgaaaaatatatgattgtgtcttcttagcgtcatgtttccttcttcttgctaggtttctgaatttatttccatgccattcgtatttaagtaaacatgctttagttatccagccagtaaatgtatattttaaaaccattttcatctgaaatatatatttttcatgtcagatgacttatctcctgttgttagttaaaatcaatcaatatgaactattttgttacatatttcatcaaatcttaactgtttatcattggacttcttcgattgttattctacttttctttgtacgcttgctgtattatgcctcctgtgaactatctttagctatatttatccaataatctagttctgatttactcaaaatatttcccctctattttacagttaacctaaacacaatggccttttttatcttatgagtatgttcatattctgttgaatatgtttataagtgaaggctgcttcaattttgtagttttgtggagaagcaaatcgctgaattgatataagattttctctgtaagtctcaagcaagtaaatattgcaattcaaaaccgaaataaaaggctgtagaagaatggtaaatggtctctttagctccttttatgctaaagaaatcaccacgcagttcaatcattttctctttcaaactgaagttttggctttattcttttgcaattttgtgtttctcaacctctcttttgttccctttgcataacagtataaaattctaaactgtttctggttctctgctgctatttttcttgttaatctgggaatggatgaaggatttgcagtctctttcaagatagaaccgttcaaaagtgaagcaaaggggtggatttaaacagtaataagatggcgcaacgttgatatttctgacactaaagaaaaacaactggtaatacttggttttgtgttctgtatccttcagtaattccaaattgagttctgctatacgtacgactgaagctgtaggactcacatccgaccaccaatcaacactctcaacatcttcccatgtgggcctaggcatgtagcagctttgcactagtcagacacaaatggtacacgctagtcatatgtatagacatttccttccaaatttcagaaggatcctctttactgatttatttctgtttaaatccctacggagttcatgtcattttactttcagatatgaaatctgaaatttccgttcttctatttctaacttgcaggacgtacagattgtgctattaaacacagtagagttgacatcttttttttcgtcacccgcacatatcattgtagtacttgtgcattttcccggaaaaaagtacttgtgcatttgtgccgctctgtgttatgtacagttggatatcttatgatattactagagtgatgtttcctggtgaattttgtaactgatttcactacattatcagaagtctgatgtaatgctgcctcagaaatatagcaaaactttattaagattggactgggatttggaatcagtggattgattctgctggcatatggaatttgcccgattctgaaacggacgcatgccagattttcagtcctccatctctcttgattcagtgtgcgttagtgcaaaataatcaagatatatttcagtttagagttgatgagatttgtaattttgtaaaacttaggcaccgaaaattttgtgcggatatgtttcttgtgtaaagcgtttctatccaagccaagacttttttgtggtgggatgcatgtttgagtaacccctttaccgaccaaattcagttctttttccttaacagttaaagtgtccagatttctgtagtgtaaactgagtggtcaagcagacggcgtcttttttacatatccctttttacaaacaccatcgaatagaacaaaaatcacagccaacacatccagaaaggaatcattagaaccatgatcattctgcagaatagttaatcctaatctttaagaatcctttgatgtgatcgactgtataatactagctcattagctcggacatcatttttgtcatcaggctaaaaatgttctaaaatcccatttagcacgcgagaaaaattcctagaagaatgtgagcaagtgttctgtgtgaaattttgacgttcccaaaaaaaaaagtagtctgatctcttattccttcattaggactcgtgttggtacatcaattctcctctaaaacgaaagagcatgagtacatacatatagttccatcgtcacttattctaattacgccctcagactctgccttagtaccatgcaaattctcactaaatcgatggcttagtttaaattaaattagctcctgtcgagcatctcgcagagcctcttgaaggactcgagcttctgcagcttcatctgctcgtggaacctccggatgaatacgtcggcgacgtggtcgatttcgtcctccagcctgaactccgcgccgccgcctgcctccgcagcggccgcgccgcgcgccagctcgatcaccgactgctgctgctgcttcccacccactccttgctcctcctccgcctccgcctcgccgccgccgccgtagacgtccctgtccatggcgaagctcggcaggctgctgagcagcacgacggcgctcctctcctgctccaccacgaagctcggcaggctatgcagcacggcggccttcctgtaaccgccgccgccgacaaggtggatgccactcaggtgctgctgctgctcgccgccatagctctcgccgccgccgccgtactcgccatggctgctgccgccgccgccgccgctgctgacgatggcgtggatcttcctgttgatggcgctgaggaggagcttcttgttgcggaggatgcccaagacgatgaggcgcgtcctcacggcgctcgtcttggcgcgcaccgccgccgacctcgccttcaccgccgccacgatggccgacaagagacccttcaagaacctggacgccttcttcatcttctaaaccaaaatgaacaatgaaccaccaattgaatgcagctcagatcaatttacttggcacaaaatcacacaattatgttgatgatattgtgcactaataatctcctatagtgggttatagctgtggctagcaatgtactgcatgcatgcaatggagatctatgtgttttggcatggagtttgttttgtagggttgcatgggtatatataggggtgatggcttctatcttcttcttccatgaagcttcaccatcacatggatggaaaaagttgcatatggtagctggctagcagaattatgggcactgagagaaaaggagaggagaggaggattacagggaagaggaaaaagtaacttattactacatcaaaaggctggtgaaagattaaagcaaaagtgatctatagcaaaggaggatctatctaatgcttaattggcaaaaatgactaaagtgtggcaccaacatcaatgcaacatcatctctaaaagtttatgatggctgtgagttgtgccatggtcccaattataggttgcatgtctcattgcatgcatggctagctctcgtgcaaaagtttgtactgagctattcatggattggcatgtttcttttgatgttttgtgggaaaaatatcttgtgcttgtagagagtttgcaacttgcaactgtactagattgaggttgctccccttgagtgattgctttgtttcttgtcattgggttcgatacttttgtgctattcaaagactatttgtttccatgttcaccggtggcgccatattgaaatgtatgtatgattcagcttaattgcattgttcttcagtggaggactgggtgataaaattaatagcccctgaatcttagcaagtgctagttttatttacaacactgtttgtgccagatgatagtggcggaagcacaccctctccaacccgaaattgttacttccatatatcgatttaaatgatttcccactaaatttcaattctgttgaaacccttggttttaaatggagaaagtttaattagggtgttctcaaaacaactggttcaaactttcaactgagggtgtgtttagttccacgttaaaattgaaagtttgactaaaattgaaagtttgaagaaaaaagttggaagtttatatgtgtaggaaagttttgatgcgatggaaaagttcgaagtttgaagaaaaagttgggaactaaaccaagcctaaagcatcaatctttagtaatttttttgaagctctaatgtggaaattaacttttttttagataataatgtggaaattaactaagagcttcaaggccctttttggatcaacatggattttcggatgatctttacaagaactgaactaaatcctatgaaaatcttgtaagttcttacgttccaacggatcgagtttcatgaataatttgagtctttcaacctggaattgaagattaggctgagctcgtaggcctgatacattcaagcaggcactctttgccatcagagattcagagtttaatgacgcccatgcctaggctctagaaaatttttggatctaccactaattgcacaagagatatagaaatgggatgccaaataagacatgttcacccaataacacgcgccacactagtctagcatgtgatactctctcgtcgtgacacattctccttccatatataatacttaacatcaatataaatgtgagaaatgatagaatgacttacattgtgaaacggagggagtatgttgaaaaattgagttaccctagcatataattggtgttacattgatgacagaatccattatatgccattgagtttgtcatagatctgaatttaccatcgactttgtcatgttatacaatgagccatcgacttttgcttaacttttacaaattaccatcgatgcccggttagcctctattagtattttataattttatccaaatgattaaaatacccttgggaataaaaaactccaaaatttggacaaaaattctgaaatatcatacttttaatttttggccaaattttggatatttacaatcttatgtttataatatgatattttggaatttttgtccaaattttgaaagttttcgtcctaggggtattttggtcatttgggtatgtaagtattaacggagactaaccggacgacgatggtaaatgtagaagttaaataaaagttgatggcatatcatagagtgtgataaagtcagaggcaaattgtaaacctgtgacaaactcagtgacatgtaatgtattgaattgagctaattttaatataaggaggtgttacctatataggatatgtattcttattcaatatttgccaaaaagaaatgtcatttaaggataaaaactcattgagcacctccctcacagaagaaaacataacaccatttccagctgaaagaacacaactatatgatttgggtaagtttatctatcacaaaaataaataaagcaaagttccctccctcaaaattcaaattaacaaattctcatgatagaaccagtgcacccctgattattccattaactcatcatagccaaacctaagggaatctcagcaggtacactttttggaagccttcgccactaaggttcaattggcccttcatcagacagacagtgcagagtgaccatctgcattttgctggctgtgccttagggtacagtccacatagtgccctgcaactgtgttcttgagggaccaatgccaccatgcacccaaagacctatcacaccaaaatgtaggccaaatcctgctccttccctttttcccttctgtctttactccgtaaatttttttaaaaaaaacaacagaaagagaatggattattatattgtcagtgaataacttgagatcctaaacggatgatcaaaagcaagggaggtagtagtagtactaggtaggtcagaaggggctaatatattgtttagtttagctagcagataattaacgattggcatgaaatactcgtaccagataggaaggtacgtattctctctttgttgtttgccgtacgagctgagctttgccgacttgtgacggcggcccggccttcctcctttctgctgcttttgtgcggatcagctggcaattgtcttcttctgatgcatcttcatcatcttcttcttcttcttagggggagggatgatgcatctttctggaagacctgttctgatacattccgtcgggagcaccattgattcgatcttacaattgcgtgttgctgttccttaattgcagaagggctaattttcttagggttaattggatccatgccattacaaatttggtttatttgaattcgtgcaaatttggtttattcagaaaaataccattccaatttatttattcatagccgtgccactgaaattttacaaaattagaactgtgccactgccatcacgttttccatacatctcctttcttttccatcttcttcattctttctcccatcttcttccctcctcaggcaccatgaagttttgctctgattcgtcaggcggtgatgagccccgtgctccgattgctggtgatggcggctccgacgagccagccaagaggcagtggactgatccgtcctctaattcgagccagggtgaggcctcctcttccttgctaagggtgaaaacaggtcaggttcggtcggatctcacccttcccatatactaacccatattttataatcggaatagagccggacatgggtagtatcgaatatagatacaaactcaggtaatgtcgggccaaaatacggaacgaatacgtaccaaaatagatacgtacactatcagttacgaatatttatttggatatcaagtcaaagcaacaatcttatatatcacatagacaataaccatttaacaattccatatatccataatacaattgtattaggctattatgaccttagaaaataaatatggtacaatacatcatagtagaaccaataaatagtaccaaaaagtgcctcacaaaaatataatatgggtaatatctgtataattatccaggtaatacccggattttttactggataatttgtatccgtcggatacgatgttcccgaacccgatctcgtatccgccaaaaaagacccgcattcggacccgatgtccgagaaaagtcttgagtatccgaatttgtctcgaaataatgtggccgggcgggcgggcgggaaatacccaccctgttttcacccccattacttgtagccgccattgcaacaacaacagcagcaagagtagcctccggaggatgcaggagagggtgagcaaccgagggttctgggatcttggggaggacctggtgtttgaggtgctacgatgagcggaggtgcggatgctagcggccatggtgtgtgtgagctggtggtggcggtagctcgtggaggacgagcggctctaggaggccatgcgcgtacgggagtgggcggaccttggcttttccaagcagcagctccggggctgttgtgctctccctcagtggattccgccggcttcacgctgtctacatccacccccttgcagcaacgcagcgccggtgtgcctaggaaataggggaggcggcagtagccagtgaggttgggccgggaccaggttcagctctcgctgtcgctatgcctaggcaataggggaggcgacagccactggtgaggaaaggcgcagctagcggcggagggaagaagatgggagaaagaaggaagaagacggaaaaggaaggggatagatggaaaatgtgatggaagtggtacggttctaattttgtaaaatacaaatgacacggctatgataatgacatttttctgaataggcaaatttgtaatggcataatccaattaacccattttcttatggttataagtcaaaatttaagttatataactcgattttgaatttgatttttttttgcattttttaagccgctaaggacacaaatatataggttttactcataaatattttttatttgctaataagagattcgtataagtatacgaataagcgaaataatgggacttggaaataaaggacgttcactttagtacctttggaattcgtctaaaatcaaaccataataaactttgaaacaagacaacgcattgatcaaactattatagtttcataaaactatagattgaaaaatgagtatcacaaaactacagatttaacactaaaattttcacgaaactacggatttaagttattgtatcataaaactacatattttgtaactttgtaaaaataatagtgctatggattctaaactctaaactctgtacttcttaactttatcactaaatttgtaattttatgatacaatgtcttaaatatatagttttatgataaatgtggtgttaaatcagttttgtgatttgttttatcaaaatatatgtagttttgtgaaatgtatttaagactaacattaccacacaagtatcacattataaaaatggaccctaaatctagttgatggttgaatggtgaacggttatatttagttttcagaagtttgatgaaagttcagggctacaaattgagaaattttacccttttttatcgacaagtgactgactctgcaaattgtaaacgataaatgtaaatgcgattgaacaaatgttcttttcctttttttttatcacagccgttaggtccatttttaaccataccatttgttggcatagttgtcaaaaatatgtctacgtttagtttgtggccaaactttagtaaatacattaaaaaatcctgctaaaatttttacaatattatcaacttgctaaaatttggcaataccaacaaaatttgataaggtttattttaactacaatctaaacataccctttataaaaaaaaaccatcccccacctttcgttaagaccactctgtagaatatagaaagttgttttgccagctactattcaattatttatgagattcctaaggatagtttgggcaattagtatgatgacatttgtccaaatgatttttttattagtcttgcaaaatgaggagggggggtgtttgtaagatggtattttgtataacttaagtttagcaatttgtaggatcagatagttatcaatgacaaaacataaaatttctctccatttctatgaggatatgaaattttggagtcggcaatcatgggattttttacccaatttgattttttgtgtcagatactccctccggcaactaaaacagtcaggatttgattcctttttaaactggtaatgtatgatagtcagccttgtgcgtttaagttttggattaagtttcctctgaaaaaggatggattaagttttggattttggtggcacactttttaaaccgctaaacagtgagtttcgtgtaaaaactttctatatgaaagttgttctaaaaaatcagattaatccatttttcaagtttgtaataattaaaacttaattaatcacacgttattaccacctcgttttacgtgaaacacttaatgttcatcttcatcttcatcttcgggagattcaaacaccaccctagattccttccatctcaggtgtatagatggacttacattgcagtatcctccgttagtccgtttcataataagtgacactaagtcactattttttttcgaaccttaatcactcaatttatttttaatatttacaaacgataaaaatgataccatatgttattaaagtagggtatgccctaaatacaagtaaaatatttgttcgctttgggctaacaatttaagggcaattaattatcaaaatttaaacgaaaaagtcaaaattacccgttattaagaaacggagagagtagctttattttgcatgtggagctagatctctctctacatcttactcttaggcttggattcagatcttggcgctaggtctcactctacatcctatttttgttttccttttcccttagctaatgtgagacttcgtaccattttcatttctcttgtctaaaaacttcgtgttgcttcattttcactctttttagagacggagagaaaactaactctgtttctgagtgttcatcctgtaaggtttagaagcagcttttaatttaagcgaagggaccacctatacatttgtcgataaattttctcctaaaaatttgacagatgtaattacaatacaatcgtagtgtaattacactgtaacttgtatgtacttacactgtaacttgcatgtaactacagtgtaatttgtatgtaagtttcacgtaattttaaattattagatctattataaagatttattttggtgaggaagaaaaaaatcacagtacacacatatctgaaaaaaattgttcccacaacctttattttaccaaaataatatgttatggagagatttttgaaagttacatacaagttatattatagttacagtgtaattatactacggttgtactgtaattacatctgtcaaatttttgggagaaaatttgtcgacaaatatatagcaaaattgtaagcgaattctatatatggggccatgaatccacggaaggtaccatgaatatgttcctcgcttgatcgatctatgcatgtgagctaatgatcaaagctcctgctctgctcttaattttcttttgtcacctgcacatgggagcacccaaggcatgtctcagtttgccgctagagaatgtttagattcgcggtcgatttcgccgctgagcttttcggcctcttttcgtccctgagaacgacaggtggtgcctgtcgattgtcgatcgatcgatcgctttgtcaacagttttggttggtgcctgcatcattacatgcatctttgcgtttttatttgcaataaaaggattgatccaaaaccgacgaaaaccttcctccggtttcgtggttatcgacctaatcgatgggtacgctaaatgggtaaaaagttcaacgagattcggtgggtttgataaactttggtaaaaattgagaaagctcgggaatagccgcagttatcattccaatcagtttttctgtttttgggtgagtgacagactgacagcgatacgaacagttgtgggctggttgttgtagtgatgggcctgggctgtttatggagttggcctggcttggcccaaccgttgttgatccctgggttatccagagttgcatcaggaaggacgttcgggaaggaaaaccaggaataagttcactttcggtccctcaaatttgtcgccaagtctaaaattcattcctgaaccgaatactaggtataacacatcccccaacttacaataccatgttaactttgatcccttgacagtacagtgactagttttggctgacgtggggagcgcacttggaccccatatattagcagccaactcttctctctcctaaagtgaacttggtagcgagcaagtggttgtagcttggtgcagcggtgttgcaagcaaggcaaggtgagcatagcagagaagcacgcgaacagcgaactgaatccccgtgttggagccgccggcggttacgagggtggccatcgtcccctttgtgtcagctgcgaaaggcccatcctcgccgtccgcgtgtgccacctccgtagctttgcgtccatctccttctctcccttctccagcggaggcagggctggtttggtggtggtggcggcggcggtgacgacgaagataactccggtgctacaactactgcagcggcctacatcccctctctctcctccattccccatctctgattcagcgattccccatctcccctctctctcctccattccccatcgctattgggggaaggggcggaagtgacgacgtggcggcgagcatgagcgacgggcatagctctaacgcacagctgagcacgagcgctcagcttagccgaccaagcaaccttctctgctccttcctccccgtaggcaccgctgctgctgcggttcatcatcatcacatcccttctccccactatgcatcaatctcttcgagctctcctctgtctgccatgtccagccaatccctattgccaggcaatcttctctgccggtaaccctcttcctttctcctctcaccacatcactgcctcaacccaccgaatccaattttcctatctcccctctcttatagccactgtcacaagctaccaccgccactccactgttggctcagcccaggaacactctcacactcacgaacacaaacgccggtgagggagacgatgaacaatggattttacagcgacgaacgccgcggagccgatcgctcctgtatcttggctttattactcactgaaccttgcaaagaaacaacgaaggagtacaggggcctcttatagaccggtgacacaccgggagctagcctccatgccggccattgcgccacgttccgcagaacccgctcgacgtcgccgtgagccacacgctcgcccggacgacgcggcttcctccgcaagaaccgacgccacgcacaccatgcacacccacgactcgatcaacactgcaacggccatgcaaacaaccatgcagcagccatgcactcgtgatcacgactcaaccaaactaacagaacgcacacgacgcacacatgcagcagcacgacacacacacactgactcaaccacgccaggaatacaccatgacgtgtttatttccaacatccactttgctacgtactagagctgagctctttccatcgccattccggtcatctcccgtactccctttaccggttgctgccctactcatgtgagccatgccctactcatagctctaacaccctccactactgccgtcgaggccttccgtccactcgagcaccgacgccccttgtcgctcctattcctctcctatatcgcctagcacactcaaaggaagagagaagaatcggatatggagatagaggggaggttggaggaagaatagatggccctgacatgtggggcccactcgccacgtcagccaaaactggccactatactgccaagagaccaaagttgacacgatattgtgagttgtgggatggactatacctgttatttcagtttagggaagaaattcagacttgatgacaaattgagagactaaagtaaacttattccggaaaaccaaaacctaagttttgagttcaaaaactaggcaactaggcttctgtataacatgctaatcatggactagtccaatatctagcacgtttatttaagctaggcatttggctgcgggttccatggaccaaagcaggaagcctatggagtaataccttcatctcaaaatacacgtaataggttggacacgggtattaaaaaagcatgtcgacttgaatggaataaggttgtgattgattgaaaagagaatataggtggagaatttgttatactttaggacaaattttaaatgctataaattgttatattttagaatggaaagagtatcattttggtcgcaacacttctaattaagaacctaagactattatctcaaaactcaaaaactttatatcaaacccttgaactttcgaatcaaagttcttctactcaaaatttcaaaagttttctacccataacttgtgtggagctcaccatcatgtctgtatccaaggaacaaggaggtgcatgccatttgtcagtgtccctgggatgaggcaaggggctcatcagcgaggaggaagatgaggacattgatgtctctagaggtagaaaaaaaaagggatctaagcttgtcggcacctttccatggaggatgaaaatatgtaggggaagtgacatgacgggaaagatgaagaaggggttcccgagcttatcgacatctcgctaggaaggaggaacatgggggtaggaggagtggcggggctcactagcggctggcgttgaggctagtaggagggagggggagtggcgctcatcaggtgcgtggtggcttgaaggaactgatgcggagcagcaatggtgggaaattaatctagagatccaatggatgggataaagactaagcctacgtttagatcagattcttgactgggctacttccatcgttttccgtgagcacactccccaaacagctaagcattgcgttttactgaaagaatttctatatagaagttttttgaataaaaaccaaataaagccatctttccggtgtataattaattaatacactaatatttgtctcgttttacatgccaaactctggccgttacgaacgaagcctaaatatatgagataagatgtttgctaccttggtcactcgtgagcattcatcaattagtttccctcacagttatatgcaggggcggatccaacgtgggtgcccacaagacccatggatgtcccccggagcaccccttcaattttttcaccatgaataataaactaaaggtccctagatggctggaggttgaagaaactgtataatcaagcctccaattttttgtttctggatccgcccctggttatatgtgagtaatcatagttttttctttctttctttttggaattaggagcttcattctcagtcgaattaagtaggatcttagactagacaatcacacattcgttgtttgttgctaccagcgcccatatctagactctagccccgaatacatattcagcacacatttgtgtgctgccatatatttgcaagagtagcaactgtaatcaatatcgaaacaattaaacaagttctatacttcacccaggaatgaacatatgctgaatatacgtctgtccgatgggaatgagaaaaaaaattcaatagatcaccttgtcaaacccatgctcgcatgccatatgaacaccatctcaaactgctatagcctcagcaatagcagacgatactagcagccatttgttatatattctgaacatgccccgatcatctctaatggccgtaatgaagctccaaaatgaccatcttcgacaaaggcaccatcgacattaatctttacagcgttattatgagttagaagtttatagttccattttctgcaacattctctccatgacattaatctccaaatgatgtccattgaacggtcgcggtgatactcttcagaatttctcgatggcgtatagaattcgtcgcattccatattgaccatatttccacatatttgtcaccagttgttcttcttggaccaggttaattaccaacaaccagatcttgtgcccatgtatgcgagattcctatcgcgcgcagacgcgccagctagctaagtcgcgagtgttttcggcccatattctcgtgcgcggcccactagctacaacctcctttttctttttttccgcaacgaactgcgcaggactcgaattttttttccttgcaggacttgaagaaaaaaaatcgtatacgtaattagttatcgataattatggtatattaagctaacctttcttttttttctcagcacaaaaaaattgaaaatctacaactttcaatgtaaattttgaaaacttttaagtcgaattttgaacttttaagttaaattttgaaagctttcatctcaaattttaaaaaaattcaacccgaatttgaaacctttcgacctaaatttgaaaaaatttcaactcgaatattcaaatcttttgaccagaatttaaaaaactttcaactcgaatttaaaactttcaactcagatttgaaaactttcaactcaaatttaaaactttcaactcagatttgaaaactttcgagtcaaattataaaacttttaacttaaaatttaaaaactttcaactcaactcaaatttgaaaaatttcaaatcaaaattaaaaactttgagttatatatttgtaaagaggtgtgcgaaagattgaaaaaaatcggaaaagaaacggcgaaaaagaaaaagaaaaacgcatccggagagaccaaaatcggaaaaaaggtgcaaaaagaaaaaaaaaagataagggagggctggggtggggcagctgacgtgcgcgccagcaatttagttggcgcgtatgcgcgcagtagtcaccccatgtatgtgaataatgcaaatatggtattttaatactcctgttaattccttcgctactcgttagaataatcctaggtttgggcacaacttgtctactcatcaaacaaataggtgtcgacctgctagctgaccgggctcactgaaccccaaaacttggcacatggcagcgtgacacgtcccaacctctctttactctctagcccagcccaacagcacgtaccacagcccagcacaaaagaaaactaaacttaatctctttcccctctttttttttaagaccggagatcatcgtgtcagagcgcagcgggagacgatacataattacagatttgtggagcgatatgatatggtcgaccgtgcacgttgccatgttgtgacggaggcgttacattacacgccgcgctgccgcgtacgcgtacgcacaccactccgcagcccgcacccgcgcgctagtcggccccgtcccacccatgtcgcgggtacacgcgcccgcctactgtttgtctgcatccatccatccgtccatgcagccatgctgccaagtgccatgcacgcggcaaccctgccacaagctgctacagtgctacgatctgagctgaaccttccacccccacatcaccccatgccgccatgccccccgcggcgccgctggtcctcccgctccccccgacgtgcgcgacgtcgatcggcatgtcgcgcgcggcagcagcgcccgcgtccgcgtccgcgttcgccgaggcggctggcttccgctgctctcgatcggttgagcgagcgcgggcgcgcgtggcgagcacgactcgatcgaggtccatcgaggtgggctgtgtggtgctcggtgaatgtcttgctctgctctactctgcttttgtggggggagttttctccgatctccttgagatctgcgaccacatgccggcctgatctcgctgctcctcctatccttccttctttccaaaaaaaaaaaaaaaaaaacaacaacttcttccccatgtgcgttgcgtcgccggctagtactactatgtttttttgggttgtttagtttgttcctggtggtgcctgaggattaacgaagctgctaatgtcggatggctcaacttggccggccgtcgatcgtctcaaaggttaggtaattaggctggctgtggctggttgtcgtctgctacattggccgaatcacctagaaaccaactcctatactctcctaagttatatagactagattactagtttaccaccctacaagagctcctagtttggattgttagggaagcaatgatcaagccccccgtgttttcaacgctgttaccccattttatcagtgccatttagcctgaacctatacgtctgcctatttggatgcataaatactcattctttgctagtgcgtcagctaatataaacgaaaaaaaaaagaattaaactgtcacgtacacgctaaacactcgttctttaacacacacttaagcaaaatctttcccgcgggcaaactattgctttcggtgtacaaactgagggagaaaatttaaccacatctgacgttataattgctgactatctgatatccagtcgttagcaatctgacgtccattgaatatgtacagttgtacccacccttaaagtatgcaacgaaaattttcatctctgattgatctcccaaacctgattaagccgcctcaagcatctgtccaatttggaattttgtgatcctctcctctccctctttaactgaagaacatatatatgctctcacgcacacagaaccgaacactgcatacccaaatctccaatcatatgcaacggacggacagacagctcattctgcagcaaagggacaccaatttgtcaatttcacatcccccacaacccatatactcacccatcatcttgtccccctcatttgcttcaaccccagcacgcacgcactcgtgtgccctctcgatcacaaactgcaaaaaatgagtcccccaatcatggcgcgcaagaactgattctagttctgcgacgatcagcggagtttggcgatctagcttgattactcctgcagctctgcttctgggctttaatgggtgagttagtttaagtaacctgttcttctttcgttgaattcggcattgttctgcgcattttgtatgatttgtttgtttgttttggtcatactggcgtatacttctgcagttcctagcacaacattccatgtagatttgttttcatggctgcccttttttactcctccctttccctctccttgatttggacagtttgaaccccatttgaacttgtggtcctacagtgatcttctctgctctgttcgtactgtaaagaaacccagcgatctttcgccggatacaagtataaatcctcggtttccttcaacactgtacctccagttcttggtgtgctgatcgattaacaatttgaaggatattttggtgcatcagttcccatagatttgtgaatcgtgaggatctttctctgtatcaatggagatcatgagagatgctgcttctcattctttaagtgttttctcttcttgaagagatgtgagggggtcacatcgtaagcttgcttttgctgggattcttgatgctgcttcttattccttccactaaagctgcccatcttcttcctccttttgctttctccctttgatcagttcgatgtccgcaagattcatccaaagccgtgcccgaagcagcagttgttgctgattccatcccattccacacaaacacccatcattgatcgatcttgctgctgtccatgttggccaaaagcaattcccaaatcccaatgcaaatccaagaagtagcgattcttttgatgtgtcgtcactgtcgccactgtgactgtccatacaagagctcacattgttgctgctgctcgtgttgttcttgccaagaaggaggaggaggaggagcggcggcggcggcggcggcgttgaggcggccaccgcgatgctgaggcgcggcgcggtggtggtggacagagacggtgaggtggtcgtcgcgaccaagatccggaagcggtgcgcgctgtcgtcgtccggcgcgtcggacccgctgaggaagctgaggctgaagaagcgaggggtggtggtgctcggccggagaggcgtgggcggcggcggcggcgtcgtgttgtcgccgtggtcgagcaggaagatgtcggagtcgtcgtggaacggcaggcgctgccacggtggcgccgccgccgccgccgcggacgacggcacgcgctcggcggcgtcggccaggaagctcgtcggcgcgctccggcagctgagctcgcccgacgacgaagatgccgctcgccggagctcggctcaccggcgatgcgtgtcggtggaggtgagtgcgcgcgatcgtttgttccactaattaatcctcctgatccatttgtttctctaatcgagctcgtcctcgttttcgttgcaatagttctcaaagagatcaagaacaaggagcaaggcatcggaggctgatggacagagaagctggcacaacggccatggccactggtttccagacatgctcagcaatggcagcacaatggaggtaattaactctgaattttcctcatttgcacagaactctatttagagtatcatttttttctctaacttctccatttagaaattatttcgagcaagaatcttgaccatcctcattaagtttgtcagcatgcatcattggcaaattatttggaaattatttttagttgtcagcatctcatgtgctgcttatctctgcacaaaaacagaacagaacagagcgattcggtgcctgattattataggttgcaaattcttttttgaaaactgataggttgtaaattctgtcaaagaaaaacatcactcatttcaaagaatgcattctcattggcacatgcatcattgtccatctcttccacaagctacgagctatggccggtacaagaacacctagtagtagtttattcacctgataacgcatgcagttaggcgaggcatttgtcatagtagatcggttgctgattctttagatttattatgcgagcggcggagtaaactagtcaaattcaagctggaaattggagccatcctgttgagagaccttgagatggaagattcgggctgtttgtcaaagttagttgcaacttgtttttcaattgaggcggcagttgtagaagaacagggccatgtcatgttggcccagagacagcctcagctcctactgtgtgtctgtcaacagcatctaatcataccgtcccttttgtctgatcgattcatcactgctctaatcataccgtcccttgtgtctgatcgattcatcactgctctactgcacccctctaggatttgatacgggaaaaacttcgtgtttttttatagagtaaaacacactagggattcaaagtttcacttagatacacaaacttacaaaacgcgcatcaaaatctctaaacttggtttaatatatcatcctgttataaaagttagtcgatatagtgaaacgacgactaaccttcccgatcgcttcagtcgttgatcacccaagacatgctagatgacgacacaagaacacacgatatttgttaacgaggctcagccgaagcctacatccccggggctctgattatgggtgctcctccgcaaccaacatagcacctagtcgctattagtccatggtacgctgccatcatctccctgcgtgtctacgctacattgtagtcgccatagttacattgtggtgcccccctctctatttaagagagataccgggttacagagtacgactctaactccaccccctaacatctattacaactccaagtccaactgtaaccaaataggactagtatatttgacacctattttaacaaactccaccttggcgaatatacgccacccagaagtagtagaatcaccataccgatccacctgtcctccagacttgggttgtcttctttgcagcttcaccgcaagccgcccgacgagtctacgccagacccatcgtcttcaagagactccgctatccctgtaatttcttcctcttaattccacctgcaacagtgctccaccttttcacctatcatctcagtcgtcttgccaagcgaaattggatttcttcctagctgtcacatcattgactccctgaagaccatgttcacctccatcttccatcttaaatttgacttgatctaatccatgcccagataacctgcatcatcaccaaatagataaatcaaactcaccagacttgaagataaccctttcttccttgttgtcttatgaaccgatctaataaatctaacattctcgctttcccgcatccgtaaactgaacctataatactttgagaaaattcaccgttgccttgaatcacttgaagaaattaacaccatagcacttgcttttcctcttcagtgacgcagatttcatatatccccatcatgccaacctgcatatcttggatatatcatgtactgccaaacagtatcgtcgaccctatcaacgatatttgacccgttgttgcccgggactttttcttcacctctggcataactccatatatctcaaccccttatcgagtcccagatatatcacatttccgtcagataattccatatgtgacctgactagcctgttgccgacagtctactcgcccttcacacttgtaagctatccatctgtagaaccttcttgtccttcttctggatccgttaacaagttcttgcaataaaccacacgtccattgaacccggtctaaccgtccaaactccgcagtctaaccagtccgtcggtctgaccaccctgccggtccagtttaaccgacatagatgcacacctcgcgcaccttctcccgagccgtatactaaccacatcaccttgatcaccacaaagctgcaccatgcctcccgtcttgtgcctgtgagccacgccgccaaaccaacgctttgcaccaatcatcaagttctggactccaggtaaatatgatctcctatccatgccaacgcaaccgagttagctcatgccatctcgtccattgtatggatatatcaattctcccctgatgaagtccgttgcttgctttgatctccatgcattgctcaatggcctgtgacaccactgcacaaatactgcatcttgcttgctttccacgtgaccatcccttagtagtgccacaccttgtgctgtgcatccaatcctgggcctgttgaccatcatgcatacacatacacatgtatgcaattaatctaccacgtatccatattgtccatgcattagcttaattattgcactaccaattccttactgcttgcagctaagtaaattgctcggtctgtctctcgcctcgagccagaatagaaccaccaacaaacttgcctgattgaccagatccacgtgcacgtgacactcgagcctcgagacaatccgtcgccgcttggccagctcctctgacccacacaacccctgatgctgctgcctcctgcttcttcccaggagccatcgcgcgcacgcctgggtgcatgccggcgactgctaccgaaaccgtcggatcactgccgcctctgacctgtcgaacacaagctgcagtacacccctgccgagatgtgtcttccaaagcttgagtcttcctgttgttgttaagtcttctcggtattggtcctcacgtttcaaggcgacacagattctggcctcatcgatccgactcgacccacatgtgtaagtctgatctgagatgaactccttaagccgtggtcgaatcctccttgcatcgtgaacccatctccgagtcaagttcaacttcatacccaacctctctgctttctcttctacatctctgcatccgtaccgtggtgattatgctctcccgatgacaatatgtgcatgtgtgcgtgtatagcacgtactcaatacatgctgtccgtgccctcgcactcaccgcagtcgcaaccctcgtgttcaccgtccacgatctcatcgtcatcggccctgcacgtccgccgcgccgcgccgcgccacgctagccggttttgcccttccgtcagtggcctccttgccgccgcggatccgtgttcgccgcgtgcgtcaggcgcgccgtccatggcgctacccctccgatctctccgaacgccttcggccacgcccggcctcgtcttccggtcacgctccgccatcgtcagtctgatcgtgagtgaggtcgtcgcctctgcaacgtcctcgttgtcgccatcgatctcatcgccacgactgacgatctcctgtcgatgcgcgatcccacctcatgtttccttctccacatgtcttcttgatccaatactgaaaccttctgctctgataccacttgttataaaagttagtcgatatagtggaacgacaactaactttcccgatcgcttcagtcgttgatcacccaagacatgccagatgacgacacaagaacacacgatatttgttaacaaggttcagccgaagcctaaatccccggggctctaattatgggcgctcctccccaaccaacatagcacctagccgctatgagtccatggcacgccgccatcatctccctgcgtgtctacgctacattgtagtcgccatagttacattgtggtgccccctctctctatttaagagagatgccgggttacagagttcgactctaactccacccccaacatctattacaactccaagtccaactgtaaccaaataggactagtatattcgacacctattctaacacatcccggtccaaagtcttgtttgaccgtggttttatcaacgtggcataccacgtggatgacgatatggaattttttttactttttctcccttcttttttcttttttcctcccttcttctcctttttttctccaatttgcctccctcctcttgcttctgccgccgaggcgccgataggtggggccgaggcccacctgtcagggctttctttctcctctgatcggcaaccgccatggccacccctcatgcgcatgtcgctccccacgacgccattgtcctcgcgccttcccgcctcatccacacgtgcgggggacgcggtcgtcgcccacctccccacttccctacgcaaaccggcagctgagccgagccgcccgagccgacgtcgccgccttctcctcctacttcaaatctgcttgcctcgagcacgattccaacctcccaagcatataaggtccacccctgtgctcccctccaccattttccccaactccccgagcctgtcgtaccctctattgcgtcctccgtgccgctccctcttgccaccatctttcggctgggtgccaccgcgctgctccactcacaccgccggcaccactgctctgagggctaccgtggtcgccgctccgctcccccaatccaccaccgtaaccctacctccaccacgagcacaggctccgccgcccaccgccgatctctggccgtgcattgccgacaccctagctaccatcgtgctaagccgccaccatagatggctttgccgctgcgctctgcgtcctggccgcaacttcgcccctccaatccaccaccaattaggcatcatgccctttagcctcttcctcttacagcagtgacacttggcgtcggtggcagttggcgtggaggagctcgaggtggctctagcggaggaagaagataaaagaagaggatgaaaaagagaagggggaaaggaaaaaaaagccatgtcatcattcacatggcgtaccacataggcaagaccatggtcaaacaagtctttagaccgggatgatacaataaaccaagtttaaggacttcgattgctttgtaaattcgtgaacctaaatgaaacttaataacaagttcgttggtgcattttactcttttttataagtacgaattctacatgttaaaatttacgtgtaaccgttttgtcacacacctagtctaactttaaattactagtccttccattttatattataagttgtttgattttttcttagttaaagttttttaagtttgactaaggccccattcttttctctaacaaaagttggatgaaaatttggatatacgtagcatgcttttcaaaccgctaaacgttgtgtctcatgtgaaaactttctatatggaagttgttctaaaatattagataaatatatttttcaagtttgtaataattaaaactcttaatcttcatctttatctacatgagtttcaaacaccacctaagttaaaaaaaatagcaacatctacaacactaaattagtttcatttagtttaacatttaatatattttggtaaaacatttgttttgtatcgaaaacattagtatatttttctacaaacttattcaacttttaaaagtttgactaagaaaaatgtgaaacgacttataatataaaacatagggagtactggttaggacttgttcgattaatgtcgagagattggcagtcctaacgttccttttatgtttataagcaaaaatttaaattttaagacttaactttgtagttgattttgtagctttccaatcgaagtttattttacagtatttatttttaaatagctaaaaacacgtatataaaagtttaaccataagttttgttagttgataataagcgattcagataaacataactgattactgtgtacttattcagagtactggtttcttgcaagtgccggcaaccctcattgatcagtttgtactgtgaaaaagcttcaaaataatttatttttttcgcctgaatgtattgagaaggagaaaaacacgacagaaagctcttgaggaagatgacatattcgatttcaaattctctccctgcgtgtttttttcaggtgcactcatggcgatctcaagactgcgcttcaccatgcagagggggagaaacaatggcgccacacctgaaggaggtgtgcagcagcctggccgcgtccaaggagctcgtcaaggctctcgccggcatctggggccccggcgacggcgccctgaacccgtcgacggcgtcgtcgctgctctccgcgctgcgcgccgagctcgacctggcgcgcgcccacgcgcggcggctcgccaaggaggaccggcggcgcggcgacgaggcggcgcgggcgagggcgcggctcgccgaggacgcgcgggagtgggggcgccggcagagggagaaggccgcggcggcggtgcgcgtggcggcggcggagctcgacggcgagcggaggtcgcggcggcgcgccgagagggtgaacgccaagctcgggagggcgctggccgacgcggagagggagctggcggcgtcccggagggagctggagagggagaggcggtcgagggagcggctggagaaggtgtgcgacgagctcgtccggggcggcctcgtcgccgccggcggcggcggcaggggaggcgaggaggaggtggaggagatgaggcgggaggcggagagggcgcaggaggagctggagaaggagcgggagatgctgcgtctcgccgacgagctccgcgaggagagggtccagatgaagctgctcgaggcgcggctccagttcgaggagaagaacgccgtcgtcgagcagctgcgcgacgagctcgaggccttcctcgggagcaagaaggatcggcagcagcaagaagaaccaccgccgcctgacgcagacgaccaccgccgccgccgacccgacggccatcagtttcagtccattcttgttgccgtaaacaagaacggagatcacgaagacgacaacgacggcgacgaagaagacgacggcggtggccgcggcgagtgcgtcgccgaagattcagacggcagcgagatgcactccatcgagctgaacgtggacgggaacagcaaggactacagctggagctacaccacggcttccaaggacatgacgacgacggcgaggtccaagaacgccgccgccatcgaccggcgatcgcaggaaggcgccggcgaggaggaccggtgggacgacggagggtgcagcgagaggagcaaggatctggacgaggaggacgccgagaggtacgaggcgatcaagaacctgagggagcagatgctggccggccatggcttcgtcctcgtgtcgcaagaatggggacaatgctagctcactgacatcgatcttctccctcccaagcttcgtcacctttgatactacgccagatttgaacagggaagatcttgacaagagagaagaatatgttgtgatgattcatagttgctctgtttcctcgatcaaaccgtgtgcatagttttgtgtggtcgctagcttcttgggcgatcattcttttccataggaatgtgtttgtgctgctgaaagtgtcttttaatttataccacatttgcattcaattttgatgtttaagttggcattccacacttggtactaggatcagatatctcaaaagtttttgtaaataaacatagagatctgtttggtaatgaaatttctcatgtatacgttttgccaattttgatgtcaattgtttggtgaagtaatatataactatactaattgaacatttttatggaagctctcatgagaccactttaactagaaatatttgactattgattagacccctagatagtattaccaagacaatatactcctccgtcctaaaaaaaaaaagcaattcctagcattctaaggtagaattagtgaaaagtgggagtgagaatgactataatgcccttaattattgaaaaaaataataaaagtgataggtaagtaaaggatattaaaataataaaacttctcgttttacgtgctgagggtacgtaggatggtagaagtttgtttttttaacaaaatttaaactctagaagttgagtttttttgggacagagggagtatctgcatttaacattgtggactacattaagaacctatccattcttcatgttgtgggaattgagacttcaaaccgtatacaaatctttttattgatttgaaatttcatacttatagcaaaacatgaaaaagaacatgagtgcagcacgatatttattaattaagaattttagaatgactacatcacaaaaaatctcatttagtacttttaaagagtaaaatatatatgtccagtccttaaacataagcggtggtgtcacctacatccgcaaacttaaaaattacacgtttagatatatatgatgttagtttaacaaatcacagtaggtccaattttcgtttgagtggggctgaccgccgacgtggcgctccatgaaagtaacaatagccatgtaatgcccgggttgacgtttagtgaaactaatgtacaatgtttggctgtttgggaacatatacaattggatcagccttggtagcatcagttgactgcagctgcatagtggttgaacctttggttccgttgatagggaggttaattccaagttaactctactttatctcccctccacttttggtccggttttgcaactacattcaagatgcattttcattcgtgagatttcacttcttttttacacttcattagttgggcttagattatttcacaccttttcaattaggattcgattgtttgatattcatagccactgtcatacactcatgtgatcccacatatcattgccatcacaagtgttacaccgaatagtgtgtcaaattatcaattttacattttcattagggaggggaagaaacggaaactcatagctgctaatatgtctgatcaagaatgaacgatctactgggacattgattgttgggtttagttctacatcggtaattgatgatgatggagcacgacttaaaagtagggcagttctcacctatcagactagttttttgggttgtgtaggcccatgacctaaagttgtggctccgattagacctatagtagagcagatccaatgtgatctagatggcccatggttgatggatcgggctgcataatctaacactgatgaatcaaagcatttgttggtgtaccttttgcgccaaacccatcattactgggcttcagcccaacaaatggttgtcatcgatgggccaagccaacctgctgaaacttaaaagaaaagaaattcgaactctttgttacgcacttgccttccgtttcctaggtggccttttcgaatttgctatatattaatttgtcgacaaattttctaccaaaaatttgactgatgtaattacagtaccatcgtagtgtaattacattgtaacttgcatgtaattacactgtaactataatgtaatatgtatgtaactttcaaaaatctctccataacatttatttcgataaaatggaggttgtgagaataaattctttcacatatatgtgtgatgtgatttttttttcttcctcaccagaacaaattttgtaatagatctaacgatttaaaattacgtttaacttatatacaagttacactgtagttatatgcaagttacagagtaattacatacaagttacagtgtaattatactacgattgtactataattacatctgtcaaattttcagaagaaaatttgtcgacaaatgtataggtggtcccgtccttttttagccaactttttagttgttcatcggtgttccgcgcgtgccaacactgtagattttttagagaggaaataataactgtagatggttccagaacctacacacattgacacatgtaattctcacctctcttttttagtaacagatactacaactatctacatctacccgtcgttctaagaagcagataaatcgaattttaccatcggataaacaagcgctctctctcttcttctttatttttttgttgaaccgcttcaattctgatgcatgtggataacggatgtaatcccggacacggccgtatcctcagggagagagagagagagagggagctgtacgcatgcgtacgtatgtatacacccaagtcagcatttccagctgctacgcacaccatgtacgtgcacagatcatcaccaagaagcatatgcatgatcgtcctggcagctatgccatggctttggcagctcagtacgtgacccggccgcgcatcgcatcatcgtctcgtgttaacgtttctctttttctgtagccgcctcattgtcattgcctcaagcctccgagatggcgtccatttcggctgttctggcctcgtggcagcgtgcgatccatcggacggacggctggcggctggatcagcgttgcgtcgcgacgagcggtgccgccccctgccctgtgcgctcgatcgatcagtcggttccttcccgctagggatgaaaatagatcgaatacggtccgaaattagctctatcatattcgttttcataattcttttcaggatcgaaatcggaatcggaaacccggatataaaaacagaatcgaatacaaatacggagcgaatacgaagcgaaacggatacggtgaagaatatttatcggaataaaaaacccctcactactcacaaatgatttttgctattgtgtatttgtatttctaaatcatgctctatcatgttattgtatttttactgctattatttttgccattttttttgactttgttttatcaattaaaaatttgaatttcaaaacttcaaataatatttggaagtagtaaataaatttagttgaaaaggtcatgaacataaaagttgtagaactcatcaagacatacaatttttattttggtcatttctttatctgacaaagtgatagtaatattgttcataaaatttacatctctcttatagtttataaaaccaaatgagatatatgtaaattttatgaataatgttactatcactttatcggatgaagaaatgaccaaaataaaagttatagatcttgatgagttatataaattttttattgatgactttttcagttgaaatcatttagtatttgaaaacgttgtttgaagttgttatatttttaaattcaaattcaaactattcaaacaaagtcatatagagaaatgaccaaaataaaagttatagatcttgataaattatacaattttatttttgacaatttttctgtttgaaatcatttactacccaaaaaaattatttgaatttcttatattttaaaattcaaattttatatagttcaatcaaactctgatgaagaaagatccgagtttcaaacggacttcaattagacccctacaaaaacttaaaccaggaatagtcctttttggggcgccagtgaggctggcgtcgtcccccaacatagcggcgccaaccaccttggtgtcgtgcctgcgccacagtggcactagggtgtcgtgaccgtgctgactaggaagaggggggcgctagccaccttggcgccaccccgcataacacggcgccagctaggctggcgcacccttccgcgccctcctccccccaaccttctgcctacagccgatcgctggcgccgtcccccagaccgcggtgccagggtggctggcgccgccccctcccccccatgcccttctgcctcgcaccgttggctggtgccgccctcttcctccgtgcagacaacaatatcacagttcacaattcaatcaaatcacagttttcacagttcacagttttgtagaataaaacaagttccaattgcacaactaactacattgacgaaaatgtccacaagtccacaactcaatcacatattgcacacatcaaacaatgccaaaagtccatcacaatctatcacatagtcctcacatagtccatcacaatctatcacatagtcctcacatagtatatcacatagttcatcacatagtatcacatagtccaccacatacttcagactaccaacaagttaacacatgacaaatagatcaacttaatagaaagcactttttccgttgccgccgaatagcttgtgagcccggagtgtacctacatttgaaaaaccaatgtttaaaacatttaaaaaacaaactgagagaaatcaaataacacataagaatggtaagctcattttacttctttttcgctgcccgagtggatcgcaagttgtattgggtgggctgcgtcccctgaggcgcatcggggaactacgacatgtctatctcatcagcatctggtgtgatgtagacctcatcctcctcctcgtcgtcgtcgtcgctaggtggagccgacgccttcccctttctcctcccttgtggaatgcgtgatgacgactagccaccaacttcttcacactcttctatcctgatggagtgtcgagcggtacttggacacgcggattgtggtagtggtggtggtactctccgcggttggtacacgtcgtccaatctaaccgacttgcaacctaatcttgctgcaagtttccggtatctttgatgaactttctgcatttaaaaaaaagaagtttgttaggcataactcaagtaatgcaaagtgctaaatcaattttacctctaagatattgcggagtgtgttctccgtgtcctcaccacccctcggagattggagggcatgccccatttcattcatactcctgaggagctctctcgactgaaagcgtgagaagatgtttgttagggtgtaaggtgcaaatagaaatcactttgacaaattcaagaaaacttacgactctgtctataagtggggcgtgcttcatttgatatccaaccctagtccggacgtcgtagggattccgcccctcatcggagtcgcggtcttcctctatgtcgatttccgtccaattagggcgtaagaacagtctaaatttcctatgcacccaacgaaggtactctgagaaaagatggttttagtgtattatcttgatgtacctgttgttccttcccactgtcctccatttatcaatgtatctgttatgctctagcctccagtccttcaccttctttgttctcaccctgtcgtaccttgacaagtagaaggtgatgaaagcaaagtgagcatcgacaagggtcaaatggtacaaaattgaacattgataatgaaagcaaacagagataagaaatattacttgtgtaattcaactcaggttgagatgtcctcaaccggccaatcttgtttcttcccgaactgtcgcatgacacggtgtggaaggtggtactcaactgcccagaaacaaatcaatgggcactggtacatgaagtaatcggagtctcgattgcacaacgagttcagggtcaggcttgaagcctcattggtgtggtatggtaaccactcaatctagaaaagttgaagagatgtcgtaggttagtatctcaattatagaagtaaatgtcgaactagaaatgatattggaagtacttacgtgttgaggctgtaagtagtccatctcattgacataatgcttgtatgccacatcccggtgagcatgtgcagtagcagtactctcaaacaggtaggccgttgtcttctccatatctggctcattgtagggccaaggagtgaagctttgcctccacttaggcctgccaaccggtagtcttaaccacatccacatctgaatcaatagcacacaaccactcatgttggatgatggtgcctgacgacaacaggccttacagagctgtctataagtccacaccaacactgctgagccccaactgaaacggcctagatcatcaaggctggcgaccaaaggaatccatatcgcagaagcaatgtcacccccagcatctggaaacagaacccctcccaacaaatgcaggatgtatgcacgggcatagcactcaacacgccaaggctcagcgtcgtcatcaagatatgagaagttctggctctgccaagacaggggtattccattatgcttcttcttgctcccttgcccctgctcaatgttgagtggaatgccaaacagctgctccacttgtacacgccatccaggattctctatcctgcccgtcaccacatgcccccgtaatgggagggccaagatcatagccacatcctgaagagtgatggtcatctcaccacttgggaggtggaagctgtgtgtctcagacctccatctgtccacaagtgctgtcaacgcaggagcgttgcacactagcattccgttcacgaccaaggtcaccccgagcaacccgccgcccttaggtacgggatgtacctaacgtcgaacactggaggggggcatgagctctaactcggagcggttgaagtacatgcattagcaattgtaaatcaattagttaatataatgtcaaacacacactactaatacttaggtataagtgaatcgatgccgattcatacccttcccgcctcgatcgcagccctgcgatgacaggcctcgtagtactcctccaaggctgggtaagtcggcggttgttcctcctcggccatcctacatgaaaaatgaataaattcaccgttagttaccaagaattgcatgacataactttaaagaaaatgaatgcgagaatccaaaataaataaatagacactaaatagacaagaataaaacatgcattgacttaaataggaaaacaaaagatttacctccctaacactatttttttggacttcttcttttttggacgcttaagacacttaggtttcttgtgaccctcctggtgacataaccagcatctattttgcaccggcgcagcatcaagttgaacacctgaaggcagtttccttctagaaccaccaacacccgagtccatttcgttcttgaatcgcttcgatctcctctgccctcttgttttaaccttcaaatctgggttagcaacaaattcttcaccatcgtatggtggccactgtgtggggtcgaggtatggctcaaagcgacttgcccatgtgttcacaacggctcttgaagagaactgatacggcattcggttggaagatttctcatcaattacatgaatcagataaacgtggatgagatgagagcaaggcatatggtagagcaatggcctttggcaagaacatgagttccccttaacttcaactttgaaggctcttgcgccgaatctaacaccatcacatgttataccacccctctctgtgacctcgtatgtctttttctacttatcgaaacaccttgaagtgtgtttgttcgccttgcttttttgcaccttcatcttactagctaccttggcggaccaacgctcccctgactggactcgcttcactgcttcatcatgtctgttcacaaagtaatcattgcacttcatgaaggtaaatgatactatggccgtcactggaagcttacgaacaccaactagcacgctattgaactgttcggccatgttgattgtcatgtaaccccaccggtagccgtttctatcgtatgcacgagaccacttatccttgtccagcaactcatattcaagccatatacgaggaccttcaggaatacgctgtcttagtgcctcaacatccctctcaaatatccacttctcatcaatctgacatatccttaggagctcttctgtctgatgcttgtccacaccggccttgtggaaattagcactgaagtgcctcatgcaccatcggtggtgaactggtggcaatcctggaacaggagtcctcatggcattcattataccagcatgccgatctgagataatacaacctccctgtgcggcccaaccacaacccgtcggacaagatcgatagaccagcaccagtctcgtgaattcactttctccactaaggcaaaagctaaaggtataagttggtcctccgcatcagccgataatgcagtcatcaaggcaccgctgtatttcccagttaggaaggttgcatctatagctagtacaggcctgcaatgcttaaaagcctcaatggaaggaccaaagcatcagaatgcacgcataaaaattttcttggtcactcctccaatgttgacaaacctatcaggatgagtatcgatgtggtagaccatactaggatttctctgcttaatggcttgtagcaaagtgggcaaacggacgtacgcttcaccccattctccataaatgagcttcatagcctcctctcgtgcgctccaagccttgccatacttcaccctatactggaaaacctcaaatatatacaaagctaatgcagaagcacagagtgtaggttgcaattttatggcattgcataacctagttgctatgaacttagatgtcagctgccggtgtctccctgaaccttcggcagtagcacaactatgtgccttaccaacccgtgatatcctccacgtgccactagacctcttagttgcatggaccttccatttgcaccgtgggttttcacatttaacatatacctcctatttgtagtagaattgacaacacggtatggacgatggtgcacgatggcgtactcctggagccatagcttcaatgttaccatggatgggaactctaaatcctttttgagaccatccacctggaatggttctaacaactgatctaagttgattccgccatctagtattgcaccatgggtatgtgttaggtccctaaactcatgaatgttcggctttctcccaaacaccttctgaaacgcacgacattcctctaatgctaacttgtcattgttaattagtggagggaatggacggtcatcataatagtctttagcaaattcaacatcatatttctcaacacttgcctcctcatcaacctcctccctattgacttctactgaaacagaatcgtgaccaccactcaattcgacaacaaagtaatcatctggattcacatattggcctgctacttgcgccgggtattcagggttgcctccatacgacgaccaatgtacactctccgacaaatgttcacttagatcaagcccctcttgtactaactcccttttcatctccctcgcttcgtccacatcatcactaccgcaatgtctatttgatggtcctgcctcccataaatcattttcaaacaaaggtctcttcttctctccttgcccctccaagtcttcccgtaccaactcagcaatgagtacattgcacacatacagcactacaacaagctaatcccaagaacatatgctaaaaatcacaaatttgggcaagaaaggggttctagggttaccctccgatctacaaattcaatcgataaaaatgaaaaaaaaaagaggggggaatggatgagtctacctttctcttcgatttccacaaaaaatcccgcaaaaaaacggcttcaaattgagtggatttgaggtgcagaggtgagggggagagagtaagggagaagaactactgctgctcgggctgggacttggcgcaaatggctgtggggaggagaaaggtggtagggccgacggggtttaagggcgcggccctcccaggaggggtacgccagccaggctggcaccgtcgtatgggggggcggtgccagagtggctagcacccccccctctgcccagtcagcacggccacgatagccctagtgccacagtggcacgggcgcggcgccgccatgttggaccacggcactagcctctctagcgctccaaaaaggataattcccgggttaagtttttctaggggactatttgtaaaataagttttcagaaaggaccaaaatgtaaaaatttgagcatgcatgcctgcttcatcattgacgtactggtttgaaccatcgatagatgatctctcaacaacttgctaactaaagtttctactattaaatctttaatactccctccatccctaaatctttgacactgttaaccttttttaacatgtttgacagttcgtcttattcaaaaaatttaagtagttattaattattttcatatcatttcattcattggtaaatatacttttatgtatacatatagttttacatatttcacaaaagtttttgaataagacgaacggtcaaacatgtttaaaaaagtcaacggcgtcaaatatttagaaaatgagggagtaataagcacttggggtttttgttaatacatcgacaagggtatacacggcgtggcagatctgtactccctccctttcacgatgtaagactttctagcacttacattgtgaaacggaggaagtaactttttaacccagagtcgattagtagcaatttatattttagtgaggccatttatgtaaattggacttacatatactccctccatctagaaaagttacacatattacttttaacaccaagaccaataagaaattaaatcaccttagatgttacaaaatcaaggagtggatgcaagcatgcaaccaatgagtatttagatgactccttaggttctaataaaacatttaatttattggtaactaagtcttgaatgcaaccatgactcctaagcatgcaaccaagtcttgaatgtataaagactacaaatagaaacaacttatttagaaaaactcaaatgtgaatatatgtataaccttttgtggatggagggagtaaaatgtacttacaagggtgttcgtgaaaaatttttggaggtcaactaaacccacatccaagggcggatccagcaagagagcggcaaggtctcgagcccccactactggcgtgaagactatgagagtccccacgaagaccccattaaaatgttttaccatatttagatagaagggggattgtaactctatctataactctatctagtttgctcagatcttactactattctttctggatctgccaccggcatcttatggatatgcatgtatatttttctaggtgtgattttatagtactacattaacaatttttattgtaaagtttgatgactctcagttgttagttttgaggagatatgaaattttctagtacttaaaagttaattatggtactcacctcttgatggcgcttacttcttatttccaatggatataagccatacccgctggctagcttacaccaaaaaacatctaaataagctagctataatgctatatggtccaaagcaaaagattacaacttctattaacaacttttttttcgaggaaccaacggcatgagtttctcctgccagaatttatagaagaagagaattggcccagttaataagggaaaccggacccaaaaacagaacaaacatggataattaaatgggaaaccgataaaaacctttacagaaaaggagaagaaagcaactattgagacctcacaaaagtcgtcgttgccgagcttaccaaaggcaagcaactttgacaacataatgcgaacgaggtctccagaaccaccaaacgtcctctagtggtgcagaaaccttctgagcgaagccttcaacaagggaacaacatcaaaaatgctgtcaacgcccattctgaacggaacccggttttcacctgaagggagagagagccagcatgacgatacctccaaggaggaaacggcgcccacaggcgtctatatcatcaacctaggatagcactaggcaaggttttcacccgaggctctctcaaaatgctccacttccgaacccttgttgcgttgccgagatgtctgttgagggtcatcgttgccaagcttgcaagacaagcagctccgactccgcctcaacagtcaatcacactgcaactcgaccagagaccacctcacacgcaggaacctagctatagcaaacctacggcgcggccgacgaccagcaagacaggacgccggaaaccaactccacacgtcacccctaccgaaccaaggagctcccggcatcgattggaaacagcctagcctaagaagggaggagcacctaagaagaggggagcgggcgccacaccgcctgtgagcaccaaaagaacaaccactgaagaaggggagaatcggatctggaggaacaggagggagggagatggaagcgccgtccctgtcgccggcaaaaaccacagcaggcctgttgcccccggccaggtccacgcggcagccggtgctggagcgcgctccgccgagagcaccactggccggtggagccaccaccgacccgatgccgtcgtcgccgacgaacccgcaccggagatgcccgtcaccggccacccgcctacgcccgagcggtgccggcgtcaaccgagcctgtcgccggtcacctcggccagatctggaagcgggacgaccggatatggcgacgccgtcgcccgtcgccggagccgtagaaagcccgaccgccgtcgccgcggagagccccaccaccgcgccgtcgccgcaatctcgccatcccgccgccgtcatcgccacgcccgcgccaggacgagatggagccgagggagatgaccccgccgccgccatcccagggcgtcgctcggctttgccggcactgagctccggcggtggcgaagcagggaggagggaggaggaggggcggcggcggctagggtttcgtccctgagcctccgcgcgagggcgacacgatggctctctctctctctcaacctctgttaacagcttagctcttctattcttaagctggttatatcttttgtaattctagtctgttttatacacaaattttttatctatttttttataatatacaactactaggtaacacctgctagtactttgatttttttttaaataaacaaaagaaaaaagaactctcctcaacctacgttttattatatatcacacacatatatatctatatcaatagttcatagcataaatatatatagagaaattttaagaccttaaccgcgacctacatgttgcaggtgaccctttaaaggcctactttaatttggtcgagaattgtcagtgatgctttcctggttattttcgagcaaaaaatttcgtacgattgttaaatacagaaacatttcttctctgccgcaacttaactcgttgtttgattagtatgaaggaagcaaccaactaatcatgtcctgcatgcccctagaaattaagctaccttacgtaaactagcttagccagacgtcagtgtggctaatggaccacatgaacacgtccttgctccttactaattgggaaactgattaactaattaatcttcccaattcgatacattaatttgctaactaagctcacctagatctcttcttgtagctaaaagaaaaggacacggaggcatcaaaccaatgcctttccgactactgtttcgacagcacgtgctgtactactactacgtgtgtgatgtgatgtgacgggcaacaacctcatggtttggacaaatgcgtttgctacttgcgggttgacatttctttacttgttatccattccaggcttcgcttttttttttgtctcgatggcttgctgattcacggcggttaatcacgatcgagcaccctaattaagtacctgttctaagtatatagatccctttctgtgttaggcacgacactcgttcgatcgtgtgcgatggaacataacaatgacagttaacttcatgaatcgcgtgatggaacataacaatgacagtgataccgcgcgctgtggcaggagtacttgtacgattcttgcgatagataggtaagaagaaatataaatggcaatgattcttcattaaaaagagatgtgagggtacttaggggtaagattggataaaaatcaaattaagggtactagcagaaatagtactctagagatcttatatttacaaataaattttaaacactacatctttatatttgtggaaagagatattagcatcatggccaaggggatcccttcgtatatatggccagtttgtttaacatggaatagtgtaatggccaaaaggggcccctcacattaccagattgcttaaataagtcggaaaaaccctgcaggtcatggaccatcgcttctccagcctaggctggatctgaggtcttgcggggaggtcctcgggtccaccacctatatgacttacaaacctcgagaacggttgaatgtctaagactattagagtcaatcaacttcgggtcgaaggtgtgtccacaaagctcctcggagcaaccatatgtcccacgcagtgtagcatggggccaactgcctaaccgtcggggacgatgtggcgctattactaagggttgctaggggattgccaggtgttctttgactaaaatgagtcaagatgagtaggtgggttattgctttccaaggggcggcgtgtgtcggcgtctagcaatggacggctcccgcactccaggtgtcttactttgagaacccattgtcacctcgggaaagggtatgtgatgttctcgcacaagcaagatagatgggagtgtattctgctagatgatatgttagctaaaagagcggtgcaccgactgcagagcttgtccatcgtattaactccaaattccattgcattaatgtagtaggatatggtgtatccaaaagtctcattttcacatagcttagatatgcatgacggacccgacgtggcgtcctggaaaccatctacagctacagcaaaacaggcatggagttcaaaggttttttttcctctcagcagagagatgagagtcaaagggtgtaaaatcccatccgatgctcattaggaggggttggctttccagaaatcgactagtactatcaagagctcttagctttgtacgaattcttacttatagtgatctagacaagagtaaggttgttatatccttcggaggcccgtgaaagggcatctatgcccctagtgggttttgggcttttggctaattgatggcaaacgatatattagtaggggatcagctcgatgaagaagatgatgatgaagagggagtaaaatattgtctcatcgtgatgcaaggctataagtgatcgaagatggcatgatgtagtaaagggttggcaagacttagctacgcaatggaccatgcataagagaaggactcgatgtagtggtgaaggagcaagtgcttggtgaaatgtcgaaggaccggtcaaggccataagaagtcacaagttgctaaggaccaatatttattgaagaagaagtgaatgggataaggcttggaaggaagaagataaaggctggtcagtttgggatggagtggattgtacgggcaagcccatattcgagtcagccagaagatggagaagtgaaggccagacagtccaggagcgagcagactatccaagagaagctttgtctgagacgggcagacaaattgagtttagtagtgccaaacaatcagataaggtaccggattattcgggaatccatcccggtgatgaactgtccgacacctatggtggcggacaatccaccccgatggtggactgtccaacacctatggtggattgtcctgcaccatacaggttttggcagcttctagcaacaactagaaacaactagttggaggggttagggctatatatacccagtgccgtggagttgttttaagacttttggaccctctactacctgagcaagccaagtgcatgtccaatagcctaagcagctaattgaagatcctttcaaggatagtttagccttgatagtgagttcttacacatttaggctagttgttctcccaccatatcaagagtttgctatagcttgtgtgctgctagagaaaaagagaggcttgtgtttcaagttggagaacttgagcatttttaagagaaggggaagcctgcggtcaaccaagtggagtgtggtgtgcccaggagaagtttgtgaaggttatatacatcgcctccataagagaagagataatagtggaagcaaagcatcatctcggtgggtgcttggtacaataagcttcatcagagggaagttgcttggagtccaagcttgggactgagtgggtctcttggagcacaagcttgtctgtggtggttgcttgaagagaccaaggcaccatcggaggtggtagcttgaataggaaaagggttgaaagagatttggcttttcgaagcccctcaatggagatgtagggttggctagatccaaattttggtaaacaaattagtgcctcctagctttttactttgcacttatgctttcatgttgaacgatttggggatcttatttgttgcatatttatatcttattgatcatctcctatttctagtgtgcaaagtgctataccttgtcataggttttcaactagtttaaaactagtgtgcgaagtgctataccttatcataggttttatactctctatacaaagtcggattgtcttgttgtgatcacattgtcgtgcatttggtgttgtctgaccgtccgctcggtaccggattgtccaggcctatactctagtaggtgagacttcctattttcctctgcgtttgatcagattgtccggctaatgtcggattgtccaatactgtgtattgtcggactgtctgtagcagtatcggattgtcccgttagttctaatttccgttcctagtttttgtaattgcatgaaacacctaccccctcccccttaggtgacatcgacaatcctcaaaacacattcacttggactcaaaggtgtgaactgcactttcagcacaaacctatatagttgctttgtatttattactatcgagtactctagggtgcatcaggttcacccaaaacgcttggtcgatcttggacccatggtttcaaatgtctacccaagctcatccctccaacgaatagtaattaccccaagtgcaatctattaacttaataaaataatagaaaaataagccttcatgtttagtctccacacctacaaattcccatgttaataagccacagattaatatatgggtcaagattataatggtctatattaaaagtgggcatactatctattatctatctcatttttatacaaacaaattatagagccagatcacattcttgccactttgttgaaggaaaggccgatgcactagaacagtatgggaggaaaaaattctagccaatattataccggttcaaacttttgaaggtgttcataggtgtaggtgtgcgtgagtattaataaaagtgagtgtgcacacgttgtaagtgtgtacattttaactgtgtttctttaaaagaaaatctaaataggtactccctccttccaaaaatctgagacctatttcattctttggtttctctacaaatctgagtcatatttatagtcactatgtgctaaattaaattgttgattggaaaccaagaagctattctaatacttattggttgcatgttcattggtttcgccatatgttgagtgagttaattgcttcttggttttgatgaaaaagaaatagatctcagatttttggaaggagagagtactaagttgaagtgtaaattaagaaagaaattttcatgtttcttgccttcggtggatatccatcttattatcggtatccgttgaaaactccgacgtatttgttccgaggaaaaaaatatttgtatttgtatctatatttgctgtgttcggaaggagggcacgcaaaacgatgttcgcattaacgtgtgattaattaagtactagctattttttaaaaaaatgaattaatatgattttttagcaacttttgtatataaattttttgtaaaaaacacaccgtctgtttagtagtttgaaaaacgtacgcgtagaaaacgaggggagttgggaactcccaacaaagaacgcagactaagattatccgttgtctttaagcgaacaaaacctatccgtcccgtttgtatttgttttatttttctcccgaggatttgcaacaattccgtacgttttcaccgctacaagtgtaggacggtgacacggtataaatataaaaggatcaaagatttctcccttccccgaaaaaaaaaaaaaggaccaaagacttcagaaccacagattcgtgacggtcgccccgtcccgtttccgcgcagaagaaaaacagcagaggccccccgcccgaatcctcgcgaggcgcttcgcttccgcctgcgccaaaagtacgcttgctcctctctctgctgccgtgtgcggtctgtctgtctgtgccactccacgctacaggccaaatatttacgacccgtgtgccgcttttcaaccgcttggcacttggcagcagccagctgctcactttgtttgcctgaatttatgactgcccccaaaaacaaaaaaaaaacttcgtacgctgactcgcatcgcagaccgtaggggcgttaccagaaaagcaggcggtcacccccatcgtttctttcacggcttgcccgctcgtttcctccagatttttatttcacttttatgattcctaccaccccatttgcgtgatacgaaccgaaccgaccatcccatcctatttactactgctcctcgatcaaagattgaatgcgtttctcagaatggagttcaaaaacttgtttggtttttgtttcatcgtagatttgatgaaaacttgattaccgatgtacaaaaacaagaagaaacataatactcaaaactaaaaaaaaaggaaattaacataagagttgctactagttctctctccctctcaaaaaggcttggcttaacttaaaacactaacaaggaactaagtacaggaaagtaaattaatgagcgataatctaaagacgcaaagacggtggagcagaggaaacacaagcgagcatcccggagatggcgagctacgaccaccacacgctcccggacgcggtgtcgccgcgggtcacggcatcgccatctgcgccgccgccgccgccgcggccccgaccgcattgccggcgccggcgttggcggcgacgagccagtgcgccatcggcacgcacgcgctcttgtgcgccaccttccagtgcatcgcctggcacgcgcgggagcagtagatcaccccgctgcacacggagcaccgccggaactcgtgcttccgcgtctccggccgcccgcaggtgggctgcgagcacatccggagcgccgcggcgccggcgccggacgccagcggccgcgacgcgtaccacccggccaggaacgcgttcgccgcgtgcgcgcgccgccccgccgcgccggcgacgtggcacccgtagtcgctcaggaggcacatgtgcgggcccggcggcttgcactcgccgctgcgccccagcgccgcggcgaacctggccccgccgttcgccaccgcggcgcacagctcgcggaagttggcctggatgaggaggcgccgcccgccggagagggagcggcggacgccgtagccgtccgagacgcagtggccgagctcgcggagcgcgtcggtgtggccgcgcgacgcggcgcgcgcgcacagctgggcaccagcctggaggttgcgcccgtccttggggaggccgctgccgttgaactggatgatcgccatcgagtagagcgcctcgccgtgcccgcgccgcgccgccgcgccgagcagctccgcccccagcttgcgattctcgaagcagtagaacatgatctgcaagaacaaaacaagaaaaagaaaaaaaaaatcaaagcacgcactcgagcaatcgagaggtcgcatgtacgtacgcgaggaacgcaacaagaaatggaatgtgtgcaagcagcgcggcgcaacgcaccatgccgagaaggtaggaggcttcgacgtttccggcttccgcgcaacggacgaggaagcggtgcgcgtcgtcgcaccatgccgcggcgcgcacggcgacggccgacggcgaggcccgggcgagcaccagcccgtgcttccccagctccctgaatctcctgcacctgtaatccccgaacaaactccgatcagaaaatctcaatcccaatcaataaccggcccgattcctcgcaacacacgcgggaaccaaaacggaaactcggacacgacacgagacggcgcgcggatccaaaccgaacacggaacacccaacggcgggggccgggcgcttacgtgagcatggcggcggcgaggtcagccggcgagccggcggaggcggccacgtcggcgaggatggacacgaccagctcgtcgtgcagcgcgtcgaacgcccctatgccgccgccgccgccaacgtccgacgagccatccccatccgccctcctcctcttctcgccgcgggacacctcgccctcctcatcccaggagagggcacaagcgccggcgccgcgcttcgccaccatgtcctccacgtcgtcgagctcctcgccgcctcaagctaacggcgacaaagagagagagaaaaaaaaaacttggagacggagaatggagaagacgaggtgtggcctttatatataggcaatccgaagaagacgaggagtgggacagtgtttcgtggaatttacgaaactgccccccccccctcatacggtcaacggtgccgttgaccggccgttctggggctcttcgggaagggtgtatccgcaatttcgcaaaaaaggacctgatctcttttcccgtttcagtttccttccttctttacctgctgcctttcttatactacgtgcttccaagccagctttatttggagctaattcattatgccagctattctggtgatctattttcacctctaatcttgggctgtaaccaaccgtgcacacatttttccaatttaatgttttcgaatttggcaagtaaaaataaacccagatttggtcgcagttaattggacggaaggtgatgcagcgtatcatatatcgcttaaatgtataggatatatgtgcttattttgggtgcagtgcaattttaggtgcccttcatttgtatccttaagattgcacaatgcatatctgagttaatgaattttgcaggtgctagctgtatttctatgaaaggtgaaattagtgaatttttatactgtctgtaaatattgacggttgtatcatctaaacttctaggaataaaccaaatttttcctcgctatatgttttcattcaccaaagatggaagtattagagatcaatatatcctttaagctaattaaaacatactacaaatgacctcttttttctatcctaggcagtttccttgacactgaattccagaaaccttcttcctcatagtgtgtttggcttttcacatattatatgaggtggttaatttgttgctaaagatatattaatttttttataggttcacttggaaatcatctttacagtttataaacagaagacacgtgaccaaagtaaagggaaataaatttagggataagatttttatacttcttctttgggtccaaaagcctagtcttagatagtaagctaattaatgcataccaatgaacttcttcttttaacctagacggtttccttgcattaaattccatgaaccctctacctcatatgtgtttagctttacacattatatatgatgtttaatttgtttcttaagctacatttatttaaatttaatgctaagaattttgaaagtacccataatttgttaggatcatgcatagtgaaggtaatttcagagtcagaaaccttgtcatcaacttacgatcaatcccggtatcatttctcacgcgtggtgtccgtgtgcgtcttccctttaatcgataggaaattaaatcatgtcaatttttagtgtgtagtcatttgtaattaacctaaaatgggtactattagttaatttgttttactttgtctaagtaattgtccaaaaattttgtgatcttacttattacacctactaaaattagtcatggcctttaacgccattttcagtaaaaatcacgataaaaaataaatctattatatttgtaaattaattctaattaagcaaaaagaagtgcattgaaatgtgtatgctgaaaattcatgggttttataagcatacatttattcaacatttctcatgcttctttgaaaatctatacactatcattttatcacagggagaaaaaaaaattaacctcacatgataaccagaagaggagagggctcatccatctacgcgtgggctaaaacaaaaccaagagaaaacgtgaggtgaaagtgagttggcagttacaattgcagggacagggagttttgcccgataaatattggatttatttggacctggctaaaccacggttaatggtaactactataaaactgatccaactggattagacataactgacatatgacccagctcgagaaagctatggacgagagaacagctaccaggtcaatcggtaacgtacactagataatcttgcacatgctcatttcgtttatcctttttcatattttgcgaggatgtttcgttttgtttatcttgaatgctaccttcccgcttaagcagtttacaaacttagcttagttgtcctccatgctgatccatatctgaaacaacccaaaagactatttcttcataaatgaaggacggaagcttcctcaagttctatttgcagtagtgtatatgcatcgacgtacattatattgtattggtgcagcttattgtacttatatcttgctaaaattttacaatcatcattggtgttcttttctcctgaagataaagattaagttttttacgcaaaacgaggtggtattaacgtatgattgattagttttaattattacaaacttgaaaaatagattaatatgatattttagaacaacttttatatagaaagttttcacacgaaactcaccgtttagcagtttgaaaagcgtgccatgaaaaacttaatcttgatccaactcttactggagcgatgtctcgaagtgcttcagggggtgtttaaatccaagggtataaagttttggcgtgtcacatcggatattatatagggtgttgcatgaggtgttcgggcactaattaaaaaactaattacagaatccgtcgataaaccgagagataaattttttaagcctaattaatctgtcattaacaaatgtttactgtagcaccacattgtcaaatcatggagcaattaggcttaaaagatttgtctcgtaaattagtcgcaatctatgcaattagttaattgtttaattagcctatatttaatacttcttgcagatgtttaaacgtatgtgacatgatgtaaaattttagggtggaatctaaacaccccctcgatttgtttttgaagtcgcgaaattttacaagtctgcaccatataaatagtggaaatgattcactaaaaattggggttaaggaagtgatccacgcatcttgcttgacacgtactatcccttctagttggttataaaatgtgaaatgctatgaagacgctattgaactttggacatatcactttaccaattcgtgttactaaaaagactatatatgtaagtcctctctccggtttcatataaaaccattaacttttgaaaatacatttaaccgatcatcttattaaaaaattaatacaaatatgtaaaaaaaatgtaaaccatatttaaaatacctctaatgataaatcaagttataacaaaaataaatgataattaaatatttttcaataaatggatggtcaaacataaatctaaaacaacagttaattattaaaaactgaagggactataatttattttgttacaaattattttatcggtaatggtaatttaagctttttatatatttgtactaatttgtattaataagatggaaaatgaaatatcatgttcataaattaacagcgttatatattcccttaaaaatagtgtcatgttttttttattaaagagggaattgaatttagcaactgtctgcatatatatcactattttcactgtgcttgttattaggctttagagcatcactaagagattacgtataatccccctcaaaaaaaatatttttgttttcctaaactgaaaataggaaacacaataactcatctctccaagagaaaacctaaattttataaaaaaacaaaaaagtggaccttctattaaactaacaaaatttttgttttcctccgtcagtgcgcactacctcctggcgctcccatgaaagccgtgccgatctcccacacgtgtgaaggagatgaggaaggtgggagcagcgagattgggaatgaataagcgagggcaccgctttctcccgcatatcaacaagcgaatatttcgagaaaggaaattccaaaaatcatgcaagggagtaggggatctgttggagtacttttggtgatgctattagttctagcggcacaactgctgcagcttcgatagttttacatcactatttcaaaatttttcatataaaatctcccagttattttaaaacagtaacatagtgaaaattttacccttcaattaaactcttcattcgtgtccaatgttacgacttgacatttgttttttttaaaaaaaatggttggaaaaagtgtgtgcctctagcattggatttgaacgttcacgaaagaacatcattcgaagcgatcgatagaaggcagaaagcaattaggctatatcttggcctctcgcgctgtgcccattgtgtttaattaataactaactactttcacttggcttggttgctaaggtaggtaactctcgtgatcagttgattgattggtactagaataaaaaatagggtttgttcttgacgacggtcgtcgtctcatttcacgctatcagacggtactggaaggcgaatatatattcaccggtatgagcaatgcacatgcatggaccatggagatgtttttgcatgtgcaaatttcctttactgagttgcaacggatttaagctcattgaacatcgaagctgatgtgtgcttttgatgtttgtaatctactccctccactttatattataactttttcctaagttataagtttaaccgagtttatagaaaaaatagtgacttttgtaacaccaaattagttccatcaaatctaacccaaatatgttgtaatttgtttggtattaaaaactttactatatttttctagtgaaacataaaaaaaatgacttagaaaaaagtcaatgacttataatatgaaactgaaggagaattatgtaatgtatttgttgtattattttgcaaggaatatatctatttactgtcatgtaatgtaacttaaacaagagaaaatgggcacggtgcttgtttatatatataaaaactaatagtctaaattgtagtatatacacgattaattattacatgtccaaatcatgacccatttgttgaagctacatatatatcctagttgtacctgttcatttatgatttgttttcatccaaaatattataatttcttcgttaaggaacaaaaaaaaatcaaagtacattcctaagctgcttttcccaatgctgaaaacaaattaccaatacactccacagctactggtgttcgataaaaaaatgtttcatgaatttgagggcaaagagacaccacctccgcattcagtgattcagtgcaaagatatcatagcaagttcaatagtatagcccactactagctccaattcatctatagccgatctaatagctaattcatataatagtagcttactatactattaatatatggtcccacctgtcatatacacattgcgtcttggagtccgtgctatagctagctacaaatctgtagcccgctgctcttctttctcatcgtctatcccattaaaatatgtttatagctggctaatacctgctctcaccaaacaaacggttgtagtagcactagcatgaagtctgacagacagagtgccagtgaaggcaagcaaattcagcaaagtgggatcagaatatctgtttttaaaatgtgttccatgtactgaattcattctcttgggatcaatatcataactaaccctgatcagagagcagccagggaattagccgaaattcccttgttaattaactactctgatcccacgcacgtatgctgctcgggataagcaagtatgtgcacacgccacattccaagagagtagttagctagtactatagcttagcttgttcctctggatcatctcatatccttgtgcatgtatgtgtcttccctactcaactaatcctcaaaaccgatgctttgcttaaatagttaattaattaattaatcggacttcagcttgccgctgccactgggtgtgtgtgtttggtttaattactgcatagggattagcgggaagtgaagtgcaacagaattaacgagaggggtttgttgcttgacgctgttgcctgtgtctcctcccctgcctgcacatgatcccgtacctgcaggggctcgcccagcacagtggcgcaccaatcatcgatgctgctctctcgcagactccctgccctatccaacgctccaatgacgagggttgcaaatgtaaaattaaagtgactttgattcttattctacgatgaacaattggcatataagatgattagttttgatatttaaagattatcagcaaagtggttttgaagataattggatttgcaggtgatcagggactgctgctgaatgtttggtcgggtctgaccggacaagagctgccggtcaaaccggcgtgtatcgagcggtcagatcggcaaagtggttttggagataattggatttgcaggtgaacatagactactgctgaatgtttggtccggtctgacagggcaaaagctaccggtcagaccagcgtgtatcgagcagtcagaccggctagcctatggtctgaccggctgattctgtgtcggtttcggtttcgggttggtttgttggatatccgtggataattcatgtttatgacttcaagatagatactatgcgtatgtaatactgctatgtgctaacaatgagtcaagttggtaagaacttgtacttggatatggtttcttggttgatgcatgtatagatgattttgatgcctcgagagattgttgccggtgatggatcgggagtcaacttgggagaagatgacgtccggacgatcaggatatcatgcggatgcttaggctaaagatcaaatgcacatggttggtgaagattccatatggcatacgatggagatattgtgtgtgtatgggatgtggagtcgaatttagagagagcccaaatttggtagaattggagtttgtaaagtttgtttcttgtacgggaaggttaatttcctagggggattaggacttcttatacaagtttggttcgtggctttagactgcctacctcaggtataaatagagagggagggtgtggcctccctgtatcgtttttagagagagttgagttgagagaatagttagggtttcgagtttagtcgagattttcgtgaggagtgctgttgttgcactttgtatacacagtgagaagtaataaagttgcaatttactttgagagatcttcgatttgtgtttgctcgggttccacggtcagaccgacggcatcggaccggtcagaccagtggggtaaaggcggttagattgtgtcacaccctgaagttcttctcccaagactaaattaaatttataaatggtctcaagaaaataccggtgtaaaagcaagagtgaaaccctaattaattaatgtaaataataattggaattggcatgtggaatttttcttgagttctacatgtcgaaatatgctaacaagatttttagtggaattttcagagctctagaaataattttaaccaattaaaaaggagcacaagcaaatatttaaatccatggaaattcttttccctttttctttttcctttttccctcctttttcccctaatgggccgccggcccatttccatctctctcccgcgcccttgctgggccggccgaatgcccgctaagcccagctaagcccgcgccccctcctctctctcccggggtcgccgacaggtgggggccacctgtcgggcccatccccaacctccagctggcgccgccgcatcccgcaaccgccgccccactcgctctctcacctcccgggccacatcgcccacgtcgccgccttcccccgcgttccccgcgcccactccctctctctcccgcccgcgcccacgctcgagacggccgggattcgaatttcgaatcccgcctctctctcctccccacctctccccactccgccggcgaaatcgcggccatcccggccacgatcgacccttgtgagcctatataaagcacccccgtttcctcctctctcattttcgttttgcaatcacccgctcccgtgctctcttaagccctagtgtcgtcgcccacctctccgccgcctccgccgttgctctggccgccactagctgccgcgccaagccgcgccgtcgacgccgtcgcgttcgccgtcgagcgggccacctcgtccacccctcccccgtcggatttcgccgccggaacccactccgcaccgtgcggatgattagaagatataaaataaagtctgccttagccccgaccacgacttgggatccaggctcatcttagtccttataattttacattcttttgcaaagaagagcgtcgaaacatactagatatataaaatatcgctttatcaaagacatcttcaagaagctcgtctaagaacaattgccataaaatgcgcaggggtgtgacctcaggaccagcttgggtgaggggtgtgctcagcgggatgctgtgaagcagtcccctcagccataaatgaaacaggtttacgcgttgttggtatttcttaacgacattactagaaatataattcacagcaatggcgcagaaatactcctggtatattatggttacagagttcatccgcaagcgcacggatataccattgtagcatttcaccccgagagtattccaagggtactatatttatttaatcccgtgggaagatcatagtagagagaattgtactaatagtttatatgttacttgtaataatcatgtctaagcaggggttaatataatctatagggtagagtgacacacaagcatagaactactcattctcatactaaattatctaagctaagtggaaaaaaatataaaagaatatattcctatacttctagtatacatagtatacatacattctagttataagattaactagctaataccctctttccgatgccctcctagtacttcgagaagccacctctggctgccgagttccttaccatagcccgtcatgacaatacaaccggggctaaatacggaggagtatcccccaggaaattaacttaggactatatacacgcgtggaggaatactcgtaccgagctgtcaccatcagcggcccacctttcatccgcagcatataaccccaaataatgatacccaataatctagacaccatacctaaactaccagatactactctaatatcatcgtcatgacatagagtaattgcaatagcaaacattatactcgtacctatgcatctcccagataagctagcagtataatcagtataacatgaacatatagtaaagttgtcattcatatactcggaaagtatttcaatactagaaatgcataaagaatagtattctaaataaagtacaaagcttacaaaagagaagaggatagctactagagccatacccgaactcttccgaaggctttcggactctgatttctattctattcctactccactagcttgagactactaaactaaacttgagagaatatgagagagctcttgcttgaagtgtgtgttgaaatggagagagtgagctccttatatagcctcccaatgacggtttgtgacagttggaatggtcttgagagaatatgagagagctcttgtttgaagtgtgtgttgaaatggaaagagtgagctccttatatagcctcccaatgacagttgtgacagttggaatggttggaaataccctccaaccgtcattgggagctaatccaagccgtccaggcaaagccctggatcaaacggctgcgaggggggttcggtcgaaccatgggctaggccatcctggcctaacttcggcaggtggctccctttgttgctcctctccgtagacttgtgaattttggcccagttcatcgtgtcaattctgagttcttggcccattcatgtataagtctgatcctcgacatcgtccgattaattgatcatctgatttgatgtcgattctcctccactttatggttattttcagcaaaaggttagtaaacctaatactagtggaatattattattctaacttaaatatgcattgcaagtataactagttcttctctattttggtaatattgacggttgaaactgatcactaacggccgtcaacacgcgtccagtccggagccgaaaagacgtggacaagacgccaacgctgactcattaggatcggtggcatcctggacgtgtgtcgcacatgccgtgcgctacctgaagtagccaaacgggcggaaacggaaccgtggcactgttttaagcaggctcggtctcaccaagcccaccactccccacatggagggttagctagcgtgacccaactgtctcgaacagaagcccgggtgcccggggcaatataggtttcaaatcttagtgggttactcaaagactatgaaaggagaccagccaacatcgacaaagacggttgataagacaacacaagaaagtggatttgtaacattgcgagccactccttggtctataaaaggaatgggacaagctacggattgagggttggattttttggatcagaccttcttctttgtagactggaaaggcgtctcttgttcttagctgatatgagaaaaacaacaaaaccaacacaggaatagggtattacatctccgggtggtctggacctgtataaactcttttttctcttgctcagcggggaagtcgggccccacaaaccttctctttgtttagccttttccatcgtatttcaccactaacccctggttgaatcttcaacctcggggaggggtctccactccccgttgtccgaagaatcgccccctcgatagtggcatattatagagggagataaagtccatagcaaatcgttgaattaggccccgttttaaactccaaatctaaacttcaatttcttcgttttccgttagcacgcttcccaaactgctaaacggtgtattttttcaaaaaaattttgtataaaagtttctttaaaaattcaaacgaacccatttttcaagtttataataattaattgatcatgtgttaattgcttgctccgatttccatggcactgaaaagctcaatttttatgctgcatccaataaagcattagagtaaactcaatggcatataatatattctcttataaaggagcaaaaccaaaatgcatatagtgcctatctatgttttccttttgtccaacacgtgttactagtaagtgtcacgtcctgattttccttcggagattaaaaatcattaaataatgtaattctaaaatttatattaaattttaaatgagttaaacaagtgaattaacgtgggtaataaaatttcctttaaaaatcatggctggaaatatttttctaatattctccatgccctaaagcattttctgaaattttccgtgaacttttagagctcaaaaaataattttagtaaaacaaatttcattcaatcaattaaataaaataaaaaactaattaaaatccccatccttgctcttgctctgctctgtttttggcccatcctcacccacaatcctgttattactcccctaagctggcgccagctcaagcaccccgaaaaaagaaaaagaaaactcaaatcctgcgctatgaacttggacgagtatagccaggatttgatttttttttcacggagtgagtattgcttatatacttctacctaatttatataatctgctagtactatacttactctaagagcaggtacaatagtaggctataagtcagatgtaaatatattttaagaagataaataaggagagagaagagtatgggcctacagatttatagccagctgtagcacgaactctaagacgtagtgtgtgtatgacaggtgggaccagttattaatagtgtagtatgtaactattgtatgaacgagctattaaattgtctatagatgaattggagctagtagtgggctacactattaaacttgctctaatcctattctgacgtggccacccgctccgacgtgtacagccgccacgtcattcggggacgtcaaggctccactttgtccgccacgtcaggcgtcgccgccgtgtcggctccgccggactctcaaaatcccaagtctcaactcgatcagcctctctcgatactcgattcgatagtgacaagaggaaaagcgcggctctctccgtctccggcggcggtgacgcgaggaggaggaggaggaggagcccgcgccgccgggccaagccatcatggacgaggagcagctgcgcgcgctgctccgcgacctggacgcgctcaagcagcgccccgaccccgccgccatcgatcgggtaagcccgcccacttcgcgccgcgattggcttcttctgacctgtgtggatctggtggtggttttgacctgtggatcggatctgtggttgtttgcttagatgcgagagcgcgtggcgggaatggtgaccccggccgccgctgcacggtccaagatcaaggtacgaagatctggcgcaaatactagggttttggttccctcctccccttggttggggggggggggaatggccgaattggaaattgggtgtgaaaagcttacagtctatgtgtcaactgatgcgatgcaggatatgagctcggaggtggtggacagcaatccctacagcaggctcatggcgctgcagcgtatggggatcgtggacaactacgagcgcatccgtgattactccatcgccatcgttgtaagcacagctcctgctcaatattgctttgggacagccatattagcttaacctaccttctgaaggaagattgcatatgctcagtgttagttttggacagacttatatgtgaccctaccttctgaaggacacacactaggcctctaaacctgccgtgaaagagtggttcaatcgagttatttcgtaagtcataatacttaattgacaaacattttagtattagttttaccattagttgtcacatttattctcacctgcacttggcagtaggagctttcagaattacccctttcagagcttccagaattacccctttcagtcttacaaacatatggtatggttagacaatgttgtcaggttctcggttctctcactaatacctgattaaatgggcaagaccgatgatggtttgtttggcttcttgaattgtcatttctgcaccaaagtcaaattttgtcacatgcctgttagatgtgtattagataggttgtatttatggttttatgtcttttggctttccatgttcctgtcttttggttttccttgtatctgtttatatatttgggctattgccctctggtgaatacaagtcgtgttcataacatggtatcagagcaggtttagacttctcgtcttcttataattttctctctcgacttctccatgattttctttgaggattatcggcctcttcatcttgaagccatgatgttcctcttgatctagtatggtgtcgctgagaatcgttcatctctgctccccaacgtcgtcaatttcttcagaacagtgtagagggctggtggttgtcctcatcaccggctgtcatcgcttcttgtcgccgaccgccgtcgcccctcgtcgtggcctccggccgccgtcggaacccgtcgctgctagtcgcgggcctccggaacccgtcgctgctcgtcgctggcctccggctggcgccgctcgtcacgggcctccggccgccgtcgcccctcgttgtaggcctccggacgtcgtcgaccctggtcgcgggcgcctccgcctgggttgtagggcgccgtcgcctgggtcgctcggtgtctgtttccccgatccggatctggatcgggaggtataaaaaaacgaaaaaaaaagaagaaaagaaaaaggcttctctggctctgctactgttgtgctctgatcgcacgtggtggctctatattttgggctgaggcattaaaaaaaaaaaacttgctgccgcttgttctgtttgctctctcgccgtcgcttcttccttcttgatgatgtcgtctttatccggcactgtgtctgttcctcgttgcccagttctttttgatggtgtcaactatagtcattgggctcagcacatgcgtcttcatatgcgtggtcagcgtctttgggatgttttatctggtgagctaccttttcctccttgccctattgctccaactatgccttcacttgcaagtcaagctactgatgacgatagagcaaaggctaaagagcagtttgatgatgccatggaaaattatcagagtcagtttgctttatacaaggcttggttggatgaggatgctcgagcttctgctattcttgtagctagtatggagattcatcttactggtgaggtggttactcttacttcagctcatctcatgtggacacacctacgtgatcgttatgctcctactagtgatgctctttaccttgctatggtgcgtcaggagcagtccttgcaacagggggatagtacggtggatgagttctatacacagttatcctctatttggcgtcagcttgattctttgggaccggctatttgtcatacctgtcagtgctgtcagcgtcagcgttctcacatggatcttcgtcggatctacgattttttcacacgcctccgatccgagtatgagtccactcgtgcacagttacttgctcgacatccgcgtgttactatcatggaagctcttacggagattcgttctgaggacattcgtcttcgagaggcgggtattctaccacttccttcttcggtgttagctattcgtactgtggcttctttggcttcttccacaccggctgttagttctacagtttcttcctcttaatcatcggcgcgtcctcctgccacagttgtgccatctggtaggggtcaccttcacttcacctattatgataaagatggacatgtggagtcattttgcttcaggaagaaggatttacgtcgtggcaattcttcgaagggtactagtggttcttctcagaagagtgctggaggttcagattcacaggaaattcttatgttacttcgtcgccttactgcttctgctgcgacaggttctgttggttctgtggctctaccttctgcacagtttggttctgctgttcttggttcttcatcttctactgagggaccatcttctgctccaggtactattccatggattctagattctggtgcttccttccatatgactcatgatagatctagtctttcatctatatgttctcctttagttcctactactgttcatactgtcgatggtactcctcttgctgttgttggtcgcgggactctttctacttcttccttcagtgtccctgctgtttcttacgttcccaaattggccatgcaactcatgtcagccggccaacttacggatcatggctgtcgtgtaattcttgattctgactcttgttgtgtccaggatcgtcacacgggtctcctggttggtactggccctcgccgccgtgattctcagcgtctttgggaccttgactggcttcgtcttcctttcgctgcgcctgctagtcttcttgcttccgctgcttcctctatggtgtcttttgctcagtggcatcataggttgggacatctttgtggttctcgtctgtcggctttagttcgtcgtggtcttttagggtctgtgttaggtgatgtctctttagatcaatgtcaaggttgtaagcttggaaagcaaatacaacttccctatcattctagtgagtctgtatctaagcgtccttttgatcttgttcattctgatgtgtggggcccagctccttttgtttccaaaggaggtcatcgctattatatcatatttatagatgacttttctcgtcatacttggatttacttcatgactcatcgctccgaagttttggctatttataaatcttttgctcgcataattcgcactcactttgattctcccatccgcgtgtttcgtgctgattccgctggtgagtacctttctatagagttgcgcgtttttctttccgagcagggtactctttctcagttttcttgtccgggtgctcatgctcagaatggtgtagcggaacgtaaacatcgtcatcttcttgagactgctcgtgctcttatgattgcttcttctgttcctcctcatttttgggctgaggctgtttccactgctaattacttgaccaacatccacccttcttctgctctacagggtgggattcctattgagcatctttgtggtcagcctcctgattattctaatctgcgtcttttcggttgtgcttgctatgtgcttcttgcaccacgtgagcgtacaaagttgacggctcagtctgttgagtgcgtttttctggggtatagtgctgaacataagggttattgttgttgggatcctgtaggacggcggatgcggatttctcgggatgttacttttgatgagtctcgtcctttcttttcgcgtcctagctccacatcatctcccgatgactcttctatttctcacttttcctgatactcctgttcgtgcttgcattccttctcctgtctcttcctctcagctggcaccttcttatgagaattctgcatcctcttatgtgcctcctcttacccaggtttatagtcgtaaacctcgtgtccagtagctttctctggatgcttctccggttgctcctcctcgatacaattttcgtgatcgtaatttagttacgattcgttcagaggatcgctatggttatgttgctacagttcttgctgaacctcgttcttatcgtgatgctgttgtccatcaggaatggcaacatgcgatggcagaggagcttgctgcacttgagcgtactggtacttgggatcttgttcccttaccttctcatgcttgtcccatcacttgtaagtggatctataaggtcaagactcgctttgatggaactcttgaacgctataaggctcgccttgtggcgcgtggtttccaacaagaacatggtcgtgactatgatgaaacttttgctcctgtggctcacatgactactgtttgaacacttcttgcaatagcttctgctcatcattggaatatatcgcaacttgatgtcaagaatgcttttctcaatggggaattgcatgaagaggtttacatgcggccacctcaaggctattcagttccagagggtatggtttgtcgtcttcgacgctctctttatggcctcaagcaggctcctcgtgcttggtttcaacggttttcctctgttgtcctggaagctggtttctcagctagtgctcatgatcctgctctctttgttcacacttcaccccacagtcgcacaattctacttctctatgtggatgatatgctaatcacgggtgaagatgcggagtttattacttttgttaaagcacgtctcagtgagcagtttcttatgactgatcttggtcctcttcgttattttcttggcattgagatttcccctactcctgagggatttcatctctcaagccaagtatattcaggatcttctggatagggcttctctcactgatcaacgcacagttgaaactcccatggagcttaatcttcatctttctgccactgatggtgaaccgttagctgatcccactcgctatcgtcatattgtcgggagtcttgtttatcttggtgtcactcgtcctgatattacatactctgtgcacattctgaaccaatttgtttctgcccccacacaaaatcactatagtcatcttcgtgtcctccgatatcttcgtggaactatctcgtgttgtcttttctttccacgctccacatctttacaacttcagggttattctgatgctacttgggccagtgattcctccgatcgtcgatctctttttgctttttgtgtttttcttggtggttccctcattgcttggaagactaagaaacaaacaacagtttctcgttctagtgcagaggctgagttaagaactatggcccttttgacagcagaggttacttggctacgatggttacttgaggattttggtgtttttgtgacttcaccgacttctttattgtcagacaatacaagtgctattagtattgctcgtgatcctataaaacatgagcttactaagcatattggtgtggatgcctcgtatacccgcacacaggtacaagatcaggtggttgctcttcagtacgtgccttccgagttgcagttggctgatttctttacaaaggcacaaactagagctcaacacaggttctatctctccaaactcagtgttgttgatccaccctgagtttgaggggggggggggtgttagatgtgtattagataggttgtatttatggttttatgtcttttggctttccatgttcctgtcttttggttttccctgtatctgtgtatatatttgggctattgccctctggtgaatacaagtcatgttcataacaatgccaacatgttcatggaaagtatttaagttttatgagacagacaaaacataaatagtatgcaactatacagtcttcttagtggacaattgatggctgaaagcgtcagcttctgcagtctgtacatatggagttttaactcaggaaaacagaccttaatataagtattcatgctctgcagggtataggtggcgttggtagtgttgctgctgagatgctcactagatgtggcattggtcgccttttgttgtatgactatgatacagttgaactggccaacatgaataggttgttctttcgcccagaccaggtaagctttgcggcaattacatgtatttgcttctctttcctttatgcaagttgtctttcagatggtaacatctatatcatccttatgcaactaggttggaatgaccaagacagatgctgctgtgcagacactatctggaataaatcctgatgttacgttggaggtgaaaactactgttaacctttttcatctccagctaattggttctatcatcaggttcaaattacacattaagttttactattaatacatgagaaaacatatctgggtcttgccaatgacttggtgaatcctatcttaattaatcattagacgaacttgctcttactcctttgcgaatgtctccttgttttctatcgtttcatctatggcaattgatgaatgttgtataaagtacagaatttcatttataagtttctctgttggatagtaaccttggatagagtaatatgctgtagtatatttattttccttctgcccatatgcaaaccaacattatacttgtttttcttcctgcagagctattcattaaatattactacagtgaaaggatttgaaacatttttaggaagtctcaaagccagaagctctgatgggcgtaacactggagttgatcttgttttgagctgcgttgataactatgaagctcgtatggttgtaaaccaggtgtgaactagtgaacatttccatgatatatagctccatcaaccaaattattgtctccttgttcatgactaatttaaccatagatgccagtgtataactgcatactgcattattcagtggtgcatcatttgttctttattcatttattccttcttttcaggcatgcaatgaacttggccagacatggatggagtctggtaagtagaaaaaactcagttaatgatcctgtcctcttgagaataaaatcatttgtgtactgtacttattagcaaccccaacagttatatcttcagcctttgttctttctcattagacatctcaaattgcatgtgaaatttgataatctaccttgccctgagaagttgctttagattacttgccttacatcagttgaccaaaaacatctacaaatatactttgactatcatcctttgttgtgagtttataatgtactactactagtcccctgcttacaattcctcaagcacagatattattgatgctaataaattacatcttattgttatggaagtatgaggaccatgctagtgaaatatgagatgatctctttatgttgatttttgtaccctttaataaaacattacatggaaatgcacatgcacttggggaaccaatatgtacagaatacatgttaaacatggtttcattctttgtgcctgtatagcccttggtaaaaaaggaaaaaagaacgaacagtttggttttgccatggacttcattttgtgctgacgctttgcttgcattagtcattataatctcgattgcatgtgacttgagaactttatgcatcaggtgtctcagaagatgctgtttctggtcatatacagttgctggttcctggtgaaacagcatgttttgcatgtgctcctccattggtaattttttataaatttgagattttgtactgtcttaatgaacatacttatacagtttactattttatattatggataaaatatttagtactggcttttgcatttgcattctacatagctggtttagtttgggagaggtgtccacctgtccggtgtctccgcacacttcctgtttttgcatatttatttctctattgcttcctagcttgattgtgaacctctgcacataggttgttgcatccggagtggatgagcgcacattaaagcgggaaggtgtttgtgctgcctctttaccaactacaatggtacgcttctatttttccttctgtttagttctcatccttttctcatctgacaaggacaactgtagttaaagctatgtggaaggttgaattagaatggttacatttgtgtagctgtttagcagccttaaatgctcgtatagttgtatatttttgttttaggcctacatgttaacaagtatggctacagttctgattttaggtctagtgtctaccacgcttttatctaatcacttgtgtgtattgttgttgcattgaaacaagtttttcttcatttttgaaaataatttgcaatgaattgcacagagtattgagcactacagttccatgtgattgtttattgatagagtgtttatgtctagggatagggttcttacacctattttcatcaaaattcttacagtattaccctgctagtttgttaacatcaattttctatcatcttcccctgcctccatttatttttggctgataaaaaatgttctttgcagggtgttgttgctggtctccttgtccagaatgctctgaaatatttgttgaagtttggacaagtttccccttacttggtaattgctaactttatgttttttcctgctcattgtggatccctttttctttgaaattttttggctgagaaaaaaacttttttgtaattttgttagcatttttgctattttctctattcctatgtaactgcacaagattagatactttttctggggaacaacatgatatactgttcatatgaaaaggggactccactgtggctcacgttgattctgattcatcatattcaactcaacattcgagcactgtactggttagtttctaaaatcttgtaatgccctctgattgcgcagggatataattcacttaaggattatttcccaacaatggaaatgaaaccaaatccacagtgttcaaatccagcatgtgttcagagacaggtgttgtcttctcccatgtgccctccctatgtttacattgttgacattgtgaaagatcgggaatgttacccttcttttgatcattttgtagaaagaatatatgcagtcaaaacctgctagagatgcagcagcaaaagctaagatggaagctgaagcatcagcagcagatgaatgtccggtccatctagataatgattggaatattaggtaagtcattcctcatgtactttattgaattccttgacaggcaaatgtgtaggaagtaggaactaacaacttatgtctaaatttggcaattactgagaattaataattaggatgtctgtgatcaattatgctaatgctcattacagattcagttgccatactaatggagctgacaagatagttgacttggatagaactttgtaccccatgctcaagcccacatcatttcttaagcaccctgcttgcaggattgcatgtgtttgaaaatgtttcatgctaaattttagctactcattattgtaggattcagaaactactaggctagggttgcactttggtgctaattgtaacttcattctctttttctgttgtactgcatcttgacatgcttgatgaataaaaatgtggcttttgtagaattgctaacttcaatatttgttcttatccagtgttgtcgatgacagtgacacagtgacaccaagcattctaagcactggagctggtaattcatttttgctattagaaaagttgtccctttatttaccgctctttggttgtatttaaccatttcgtcccacttttcgaaattatacagatagcctcccagaaggccttgtccgcgaactcccaactgcagattcctaccaagaaccagttgctccagttacatccggggctattgatgacgaccttgaggagcttcagcgccagcttgatgccctaaactcgtcttaatgttttgtaaaagctggaccgtcatcattaacttggtttctaccaaagctcaacactgggttagaaaaccaacctgggtactgatgcttgtgtttactccgacagagttacccatttcagtggatatagcttctgttcataccaaagaggttgaagggttttaagttacttacctgtactgttttgagcttttgtgtacaattttgccttgagttaatgtagattttatgaggctggaaaattcactgttaactaatgtggacgctctgctaattaccgataatagttcaaaaagaaaagtagaaggcattcgtccagaactgtgatgtcatgctgtaataggcttttgccagtgctgtccgtaaacctcaataagcttagctagttgtgtacttgtgtgtctcggcaaaatatcttgcgtatcctgtcagtttttctattataaaatctaaacttttgcttattcaagtaaatacttattccaaaacttaatcatccactaatttcttcgatgtggtcgttttcatttcctttcgcaaaatctgagctgcaattttttgtctaattttcttgccaacaatttttgtctacataatctgatgctaagtgtacacgtgttccaaactcaatcaatctctcagccagagcaacataatgatagggagaccgtgctaaaatatactcccttcagggtttacgaaactgcacgattatcactgttacatgcacggtaaatttttcagtttttgaaaccacagtatatctcacggtaaccgcgcggttaccatcgtaacccttaccacggggttgcgtaaccgtgccaaaaacggtaagagaaatcctgactccctccgtcgcaaaatataataacttttagcacttagaatttgttctaaaatataacaatttttccaccaatatttccttcctaaccaatcacaacccttcaccatttactttttccacgtaccttcacttctcaaccaattacaatatcttactatttaattatatatgctttcttaataaccgtgttcaactctgaaactataggtattctacgatggagggattaataaataatgttagattaaacacaatatagtagtattaacatgctacgatgtgacaaccaaaaagtatccaagcaaatcagtcacttcacagctgcaggaaatgtccatgtgcccgtataaaaaccgcaaacaaaggattcaactttataggtctgattcagcggttcagtccccaattgctcatctccctgaagttaaaactcaacgaaaatgacctcgcgatgcaggacaacaacgtacaggatttagagcatgtgcgaaatgagtctccctgaccatgtcaatttcgttcctagttagcttacccgttaagccagagagatggcatgggagacggcggctgaaatagccaaaaataaggtcgtttcataggttgagccaaaaatgaggtctctttttctttttttgatagctaaaaatgaggccggttcgtatttttcttagcacatgcttgtttgcaaagaggccaggatgggagggacaccgatgtaatttgacactttgatgagcgggtactctaatttaccttacctttgatggtaacggtataaaaaaaaagaccgttcaaaatcaaaattttcctttgatatcattggaatgtagttcttacaagataacctagctaagctggtgtttgatcaatttagtccctgtcacatcggatgtttaaacattaattagaagtattaaatatagactaataataaaattaattgtataagtgagagctaattcgcgagacaaaatttttaaacgtaattaatccataattagcgcacgtttattgtagcatcatataggctaatcatagattaattaggcttaatagattctcagatttggtcaagaggaagagacttataatattgtggccactcatgattattttggctttgccctaagattgcgatcaatcactttttatgattcaatcagctcctcacttcttattaaggtttttgtgaccgacacctagctctttccacatcactccactgtttgagcaatttccactctcctccggatctgatctatctactcggcaattcatccagtgacttcacggtcgccaaagaagccccaagaagcatcaaacatttccaatgcgtatttgtccaattgacacgtcgaaggaatcaacgttggtctcgcgaatcagcctagagttatggaatgagttttgtcattagtctatgtttagtacttctaattagtgtccaaatatctgatgtgacacgggctaaaatttagtccttgatccatccagggccttaggacacaaatgaagtctctacatcaaattaaaatgaaaagatagtaagatatgctgcttttgtcacagagatgaaatcatcgaacatttgttcttccaatatcatttatcttgtctggtgtggtccatcatgtaggatcgaacaagaccaaacaaatctaccatggggtgaatagtaggaacacaaaaaaccaaaaacttgtagcgaaaataaaagtaaccctcgtagttgatggagatcttgacgtagtcggtttgaccaccgtgtacacatcggtctgaccgcctctacgcccccggtctgatcggtattgtccgaccggtcggaccaccgcttcctcgccttctgctgctcgccgtcgccggtctgagcgcttgcttgctgtcggttagaccaccgccgtttcgccggttagaccaccagtagtacactggtcaaactgtcgggatctagaaaaacacgtaccaataaaactcttgaaaataaatcaactttattgcatcaatgtgtttacaaagtgcatctaaagcacccccttctcaactcacgagctaggattgaaacctcgaagcaaaccctaacttttctctcccaaaaagtcgatatcttctagcctcaaccccttatctatttatacccataatgtggctgcccctagccatgaatccaactcatacaagaagtcctaatcccctaggaaaccttcccatataagaaacaaactttacaaactctaatctttccaaacatgtattttaatccaaatttaactctgctttccatatgcagacaacacccacgtgtatgccatatggaaactttcacatcgacatgcattgttctctaacctgagcatcccatgtgatatcctttaccatctggacttcaaattcccccaagcctagtcccgatctatcactggctatatttccatggcctcaagcaacacctgcatatgaacaacaaagaaactctatatttgagtacaagttcgcaccaacttaactcacatcagtacacaataatatcacatgcaaatagaaaccatttagaaattataaacatgaagcaatctagaaatcccacgaaaacaacccgaaaccgactcccacctagagcctgtcggcctgaccatcaagcaacctggtcagactgcccagacacctccggtctgaccgacatgcaccacccggtctaaccggcaatagtgacgaccaccgcattgtttaccgtccaaaaacacatcaccgtgttttcataaacatttacatgtgataattgttcatcaccacgattaaatcatcacataattctacatatcattcatatggtttctaatttacaacctccttgtaatgttactcatatgtttaagaattggtttttatgtgtttccaaagagatgagaaaatctgtttttgatagatacaacaactatttgttgatctatttggctaagtaggaataaggggtttctttataacataatagtatcttctcctttgcatgttattgttttagttacctggtggctacaaaattccttctagatcagcggctaggtctgtttgaagttgatgctgtcaggaggcccaaatctgaatccaaaacgtgtagaactttatctcttgtcatctatggaccaaaagtggcgtggtgagataaaagaagacttggagaaggtcttggtttagtccccaatcaacttcttcaatcatccatgtattccttacgctcggtctcttttctttcgcccaagaaagtacctctgcaaacaaaaacacacgaaactcattgtgtagcaacgtttgttcaaatatataacaagtaaatctattatagaacatatgcacctttagttgattaatacataatgtcgtcatggttagatccgagctagttgtgtcctcatcatgcctctcctttctaaatctgttgttttagaacagaaagagaaagagaaagagagaagaaattattttttctcaaaaaaaagaagaaattatttgtgtcagtatcagacagaacagaacgggtcgaactgtcgaagaagagaagagctgtctagagattaattaattaattgagcaaagtcaaactcggccagcatcgaataaagtatattattagaattttgattttgacccaggaaaatgatcgatcgatccaagtcattaaaacaagcacgtggacttatttaataaatcaattttctgcagcttaccagtccactcggcctctctgtcaggtgaggctgagagtcagttattagtgcctactcctttcatctcacaaagactttaagaactttattttctaagacagttaatatatatattgaagctacaaatacattagtagagtttagaaatgtaagggataaatgcatttaagtttgaaaaagtaaataaatttttagccttttagttttatgttggtatatgtgagatatataaaaataaaatcgttttagggcagagatagtaggtagttttgccgctggtcgaccttgaccacggcaacactattgtacgcctttgggttatcttgacaattttttacacgttattttctcgatgaaagctgagtgatcattaggaccactactggagaaatgatctttactcggtcgactgatttccacaatagtcacagatctagtaaaaaccgggactaaaaattatttttaatcccggttataaaaattttgatctggagtaaagatcatttagatcattagtcacggttggtactataaaccgggactaaagattaaggactaaagatctaatctttagtcccggttgaagttactaaccaggagcaaatatttttctctcatctctgatcggttaagtcccagactaaatatttagagataagatcatccctctccaactcccctaagatccaagcctcctcctcctccccttccctctcctccccattctccccttcctccttctcccctctactcccctcctcccctcccatccggcagccggcagacggccggcggcggccgtgccgggcggcgctgagcagggccggcggcggcctgtggccgaggggccacgcgcggcggtcgtgccgggcggcgccgagcaaggccggcggcggcctgtggcggggggccgcgcgcggcggcggcgggcaggcggccggcggccggcagcagcgagcggccatttttttttataatatgtgattattgagatgtataattctgtgattcattggacatttgtatggatctaagatgtataatgtgtgatgtatttgatttgttttgtattttttaggatttatgatgtatttaatttgtgtgtatgaataacttcaagatttgtgatgtagagttaggatgttatttgatttggggttttagggtttgatttgggtatgtgcatgccactcaattcaggagaaaataaaaaagaaaaaaaaaagaaaaggggaccatctggactgtctctctttaataacggttgttgttatcaaccgggactaaagatacccatatttagtcccggattactactcccggttggaaacccgggactaaaaggggttaccaaccgggagtaaagaaggtttgtccacagtggacatctattatagattaaatgcatgtacatggttgtcgccaccacacagccaatagatagactcatgtcgacagcaaatgctaatctagccaagatttgttgatgtactagagtagccaagataaaattggattttccacaaattaaattaaaatggtttcatttaacttatggattgattttgacagttagaaattttcttggaggaaacatcgtggatagttacaactagtctttagctacgtgcacacacttccttcacatcacctagattttttttattttaaacatacaaattaaatcttaattcgcacggcattacattactgcaagagaagagaggaacattggctacaatgcagagcaagaaggttgccaagaaaaacaaaagtaaaaaaaaaaatccatcaatcccacgaaaaaagatgtcaataacatcactggaaacattaagggtgtctttgaggagaaggggattggagagattgggaagatacgcaaaacgatgtgagccattagcacatgattaattgagtattaactattttaaacttcaaaaatggattaatatgattttttaaagcaactttcctatagaattttttttgtaaaaaacgcaccgtttagtagtttgggaaacgtgcgcacggaaaacgagatacttttctctctcagtcccctggatcgcccaggaacgaacgaagcctaaatcgtgttgactatacctagcaccgacactgtttcgagttctcaacggcgcagctgctattaaaatttttgaaaatgaaaatttttgatggtaagagaaatgaaaatttttcagtgtcacatcggatgtttgaccggatgtcggaaggggtttttggacacgaatgaaaaaactaatttcataactcgcctggaaaccgcgagacaaatcttttgagcctaattaatctgtcattagcacatcatggactaatcatagactaattatggctaatcatggactaattaggctcaaaagattcgtcttgcgatttacatgcaaactatgcaattagttttttctttttatctatatttaatactctatacatatgtccaaagattcgatgtgatgtttttgggaaaaatttttgggaactaaacagccccataatctcagtattcttgcgtcaagtttggtatgtgatgtcattctccgctgtagctagcccatctcacgaagagttcgttggggagcagggtttaacttaccagggaaagaaagttacacaagtgaatagtgagaaaaatcagatgaaattgaacacaaagttaaatttttgtctcatttcttttgagcttgatgggggggggggggttaaagaatcattgccattatcataccacggtggtaacgtcagttatcacggtaaatgatggtaagagaaactctagctagggcagggtgagaccgatggtaaggaaaactctagccaggggccggtggggcagctagggttggatcaccattattattggttaaatgtaaatacttcccgtatatttggaacctcaaagtttttcaaatataattaagggattttattaaagcacagattgcactacattacatctctgctctctacttttagcatacgtctaaaatttgctaaattacaagccataaaagagtaggtgacaccatgacatggaaattcctgcttccctcggaaaataaactactcatagaaggggcaacacctacctactatccaaatcacaggaaaacatttcaaacatatcttgcatattataattctagatcaacgcctcgaccatctagttgtttagattatccatgatatataacagatatgtataaataaagccgaaggccaaaactggtagagattagcccaaagtaattgtgacggcatacgatgacctgcatcgaaagcaacatattaatgtcaataataaacctgtgtctttgtcgcgcacatggtcgcaaagcaaattaattctaaaaagaggcaaaacacatctaatagctatgtatatatagttgggtaatctccttttcataattaattaagcctaaattggcattggccattgggcattggcccagtcaatcgagtgtggatcaagatcaaatacagcaattgtgaaaaaagcagggacaaggacgtacgttatgctgtggagtatatatgaaatgttggctgctttatgcgtgcatgtgcatgggtctccttaattggctgggacctatataattaacaacggaggttttggagccttgggttgtcattccattttcattatatatcttacaaaaaaatgcatctcctacttagtgaaaatgatatatatagtttaggttactactaatacggatcatatatataatttactcccaaaatgctctttttgatttcagtttctgattgagcgtacgcacaggtacgctaccttcatctctaattaataatgggacttagctcaatatagagcagataattgaacaaaatatatatggattgtcaacttgattagagagataaattaaatgttttaagaaataaatttaatatgtaataacttaaaacaattagtctaaacaatataatagcaaaaagtttgttgagaaaatatattttctaagtgtggagcaaataatccgtttctcaataatccaaaaaaaacttagtatacgagatatattgctgatagatgcataattgaaaaccagctaattaaaacaaagctgtagttaactaaaatgtggcacgaataacaaactttatactacatggcaacagttatatcgttttgcaagagagtaaaactaaaattgaaaagataattatatataggtggtattttaagatatagttaaagcacgaaaaataaactatcagtgcatgattatttgagttttaattattataagttcaaaaaataatcaaattttatataaaaaattttcgcacgtaatatactagtatatatttagcagtttaaaaaatatcctaataaaatattgaggtaaaatctgtatgttaatccgaacgataaccaaaagagcagtgaatacgtgtttggcacgatcaaactaatagtacacttgcaacaaataccatcgcgacaaatatattttcacacagtagaaaaactagggttctaaatcactagagatcgaaccgaaccttcgtccccggccggtggccatatatgccaaaatccccggcagctaagctaacaaggtatagccaggtgcgtgcatgtataaagcagaaacacggctctccagccgtacacaactctcaccaaagagtaaccaactccgcaagccagaggtaacaaggcggacacgccttccccgcctcgctaccctccaaaaactcgatctctcctaccacccaccgctagcttactgctgccgtcgcgccgcgcgccacgcaacccatatatcctccttcacacgcgcgcggaagagagaaaaaaaaaatcctataaacccgagacgcgccggcgctccctcgcccacaaaaaaccgtaaaaaaccaagtactccctcctccatcgctcgcacgccgtcgcgcgcgcgcacgcacgcacgtcgcctccctctcctacacacgctcgcccgcctcttccccgccaaacaaaccaccccccaaatcttttcctccctacccactatatacgccaagaaaacgcatacaaacaactcctcttcttcttcctagcttcctccccttcctcctcctagttcgtggacactagtacgatggttgggccgatcgtgatagcgtcggcggggctggggatgctggcgggggtggccatggcgaaccggaccatgggcggcggcggcgacgggcggcagctgccggcggcgtcgaggtgggacgcgcggccacggtgcgccacgtgcggcggcagcggccgcgtcgactgcctctgcaaccgctggtccgacggcgactccggctgccgcacctgcgccggctccggccggatgccctgccgcagctgcggcggctccggcaccggcaggccgctccccgcccgcctcatcgcccgcggccaccaccaccaccacaacccgccgccgtcgtcagcgccgggacgaggcggtgactacagctgatgatagccaagccaagaagacaaaaaagtatatatatgtacatgtccatattcatgtgtggatcttgattatatatatacatatatgtatatatgtatcgatcttcatcgtcgatactgcttgctcatctacaagatcgactatgcatatgttcttgtgttgttcgagttgggattgttaagttgaatttacacaactcaagaagatgtggggaaagaaaaaggagctggggcgagaagccgacaactgcaggttcatcaagttagaggccatggagagatgaagatagggggatagctagctagctaggcaagtgatcagttttgttggccaagggaaagttgtagttcattgttgtggctgtaatatatatgcatagaattcgttattataaagattaatttccagatttggatcttcatgatgagctctttcttcatctccttgcatatatataggtggtgtcaatttcttgttcagcttatagcatatgtcatctaccaaatctttctgcatatagtgcatatgctaggtgcataattttctaattaatccttgtacttgcacctctaatatgtgtctgtcatctaccagatctttctgctgactttctgctatactgtagttttactgcgtaaatttgcaaaagttcaatttcttgtgcctttcaggtgacgcacagaattgtttttctagtactccttatgaatgcaaagatctaaattgtgtgcctacagagatctaactagtacgagattgagggttcaccatctctcagtatttttaaactaaactatagctagaaatatagagcttgatcatgacatgtttagcatgtgtaaacttgaaaagctatttcataagaaaatctcaaagaccacatagaacattactatacaattttgcataaatttcccagcaagagctcatgcaagtcggaataaacaaaaccgtcggcacaaactatcctttttatattttgaaatttggattaattaattatagtcaccttctacagaattaaatacacacaagattgactattcatatatatagtcgctcgtttttttaatgcatgtatatcttttatttatttgtggttgaaacaactcatggatgacgatcgccagcatgatgaaattaatgaataataatgaaaattataaatgggcagtatgggttggagatcaatgaatcatcagcaacacttggatggctacagagagctagcgatgcaccacgagatttgaaggaaaagatcccgatagtatacctgcatatagatacagatattgtaggacaatctcttgtcggaagcaacttgttctctgtctgtgagctgatatttggtcccctcttcctggtggagttcaagaatacgaaaagaaaaaagatcagagctggaggcgcttgtgagccacacgttgaatggataagctaagctaggtgcgtgccaaatgacaagaattgtgtaacgaaattatacagggatacatgacaatatatagatgcagagtgtgtgcgtctatagcgctctacatatactaaaaatttcttacaaactttttactgatgaaaaatctcaaccgcttgattaaatcaactggaagttctaaaaagtcaagaattaattgcaacatgacccaatagcattaacttgtacaaagttagtacaaacagtatagtacgtatatcttttcccataatttttttggaggaacctacaataaattgatattaagagaatttgtacatcatatatatcatcttataggtatatatacactttctaacgactgaaaaaataaacagccttaatagaactcatgggccgggaattatactgatggtctaatttgatcacaatggtttttttttgttgtaaaaggttttaaaatttttatggcatatataactagttataacatctcatcgatcctttctcaccgtgtaaatgtgtaatgttttcatgtcaacttacctaaatcgatcctttctcactgcagtcccaatcaaagctagctaactctgccagatctttgggtagctagtgtgagtttgattagctagctgcaggctgcacggacgagtgtactgagacatgttgagtaagcaaacatgtacgcatggccgggccaagcttgcactggaggcaaattaagaagagtttcttttttttttccttgtggttttctcttatgttttgagacatgtagtatagttactatcctgtaaaagaagaagaaaaaattgtggccttgcctttgaggcttggaccgcggccggatagtgagtgtgtacgatgcatccatactagaactctgtctctcgactaatcatttttttcaaaacaaactccactaaaagtctagaaccatatatatatgtaaggaaaaagtccatatatatatatatatatatatatatatatatatatatatatatatatatatatatatatatatatatatataccattctctgaacatgtcaaaatatgcaggagtaggagcaaatatagccggcacaaggaaagagattgatggagtttcgtccctcggcaggcaaaacatgtgtgtatatatgcagctgcaggagagcaaagctcaaagccaaaactaggccggtttgtcaactgttacaggtgggcagggttttcgtttgtagctgaagcctttgaaggccaggtttgactttgctgtggttggccgctggacggccgggtcgtcaggcaacctatagccttgacacggtcttcaccaatcgaagcactgcacaccgaccggttcgtcgtcataacgtcccagcatcgatggatggatcgatcgatctgtccaatattcttttattcattcactcatcactcatccaccgagctagctactggggtcactgcgaatagtcgtatgccgacttcattatattaccctcgccatcactttgctttcagagtttcagtgatctacttttacggtcattctcaagcatagagattttgttggctacggagtaatcgtgatggagtaaatttatcatttatggcgctagcgatttatcaggtcagttgttcttttttttttaatctgtcatactctataggctatgtagtaaggttgtgttcctacgtgcaactttgttttagcttttcgctggttcgtaaaatgagctgagcaacaattctttcttagttaatgtttattgttatgtaatatatgataaaatgaaatatttaaaattagaaaggtgaaataaataagatatggctcgttaacgagcctaacgagggctactcttttagtttattaaggccaacgagccgagtgaaactggctcgttaagatatcgagcttaaattaaactgagccttaacgcgagccgagctagctagcttgttatccagtatccacctctaaccaagaagaaaataattttattttattaatagatccaagaataaaaaatagtaatcataaaattatatatataatctatgctaacatttcatttgtttcactacttattttgttaatttaataatattgaaattcgaaattaataactagacaattcagaattaagatatatcgattagtacaatgtttggagtctaaactatagtttttcactaatagaagtaataattatgcaatttaaaattagtgactttaaattttggaattaataagtattgttggaacaaaatccaacaacaatacaaagtgttagaaacatttggggtggaggaaaggagtagtgtaagatgcagctaaccaagagacttctcggtagcagaaaactccattatacggtataactgttgacccgaaaaacacacattaattggcctgggaggtctgcttagctcctgtgcaggtctaaaagttgatgagatgagggcgtgccagtcagttattctgcaactgacaagatatcagtagatcaaattgctgatcggctgagaagccgatggagtagttccaaccaatgccgattccagccgatatcgatatcagccgatagcgatagggttttgagttatcggctatatgtcaaatgtatataatgatatgaaggcaatcgactgatgataatataatatagcaatataatccagtagaaaccaatcggctaacaatgacatgatagaataagcactgatccgacggctaaagcgtacatcggctggaggtctgatgtcatgaaatccacaagattagattaaatagtgaaacctttgttgcgatcggctaaacccaacttgtatgtaatccttataagccgatgcaacgtccagataacttatcggctagcaccccgataaaacactagcatgaacctatcggctttacaagattcatattatcaataacaatatggtaggtcgaacctaaccgatgcagcacgagattgtatatgataatctaatactcgatgagccgatagatctatctaatgtgatggatatgacaaatctatttagaacaacattatgattgtagagatatatcggttaagacagaagatcggacctaaccgagacagttccaactaaaccgatgcgtcactaaaaacaatgtaattagagatagaattgagatatcaggtaggcaaatatatcaaccaaaccagagcgatccaagagatcgaagcgatgcagccttgaacaacaccaatgtagccaacagattcaccagggccggcggaacgtaggacttacccctttgccggagatcgaaagccgatgcagccccgcgttaggtgccaagttccgtcggatgataagtaaaaacctcggtaaaaagggtggcgatgcaccgagagtagtttttattgatcgagagattgatagattacaatgaccccgggtgaacatatttatacccatagggagataccagtccttgtcggacaagaaataaactaaggataaaaaggaaaagataaaatccttataggacactaaacacactttcctaaagataaaaggaaactaacaaactattcctaattaatagataacttgctatgccgcatactctttgaactcggtctcttctggataagattcctttagtagatcaatttccttaatcgaatatagcaagaatccgacaactgacgacttgataactctcatcggctaatctcaggacttcgaagccgatgattactctaggcttaccaaatttacattattgcttctaaccaatgaccttattaccttaagacattcgggcagcttgtctagctgacaggtggggccctcttgagggcgctctattacaagcactagatgtttaaactaggtccatcatgatgatgggccaactaactatccaggaaacctgagctggattcttgagctttttgaggtcttcaaggcctcgaagtgaggcggacggttggtgggagcattgaatgcttccaatctttgttactagttaaaccgaagtccttgaggttcagttcccttgtcctcaatccatctagaagccattcgagaggttggcatcgaaagcacttgggggctgtttggttcccagccacactttaccattacttgccaacaaaagttgccacatcttgcctaaggtgaggtgatcaaattgttagccacaacttactaagcctaagggaatcttgccacacttttttgagctattgacacgtgggacccaatttgttggaggggaatcttgccacgactgtggctacaaccaaacacctgtcaaatttgcctaaccttaggcgtggcaaactgtggcaaagtgtggcttgcaaccaaacacacccttgatgctgcaaaaaagtgataccttacgacccgcagccttcacaccgggctccacggagtgcctcaggcctctccggaggatccttactgttagagcggagacagctagctaggggatctcctctggccttcccccaacaagtaccaatttacttataattggaatttatattcagtatattgcttaattaatttaatatttttcaaaaaaatagaattaataggtacccatcgatcttactccatttgcagtctcggttatagcatattagcaattttgaggatctaataattaagaaatttgaagttaataaatatcgacttgaggctttattttggttcatttagtaatgtgattgcgccaacgtgaggtgcaaaggctgtaatgtttcttccattatctaaatatttgacatgtataaagtcaaaagtttgacatgtataaagtcacatcatcaagaaaatattagcctttggatttttctcatgctttgatctcaaccattcatgtctcatgttcatttacaacccacttaatatagttattactgtaaatctcaaaatccattaaaaccatacatgtcacctagataaattaattatagccattgaattcttcacatgtttggtacataacaatttgtgtgtaatatacactcgcaattccacatcacctattatcaagcttaaaatattgtccttttacatattataaactattttcttcaatgttttttaagtatttctaaatttttccactgcaatgcgatgggtaaccactagtataacatatttggtcaccggctcaccgccttcgagtgatttgacggggaacatcttaagtgaaagttgagtagtaagctattccatcaaagatatcctttgctcattgctcggtgctttgggttttatattgtatttgatattttacatgctagatcaacaatgaggttggatggctatggttattatttgagttctatttgagaccctaaattggagtctacccttcctcgttattgtaaaagagaaggcaataaacggaaagtctaatgcgcgatcgatcactaccacgatcgggtagcgatcaccacctctccccctccctccctccacatttccttttttggcaccgcattactttcctattttagtaaatttatgcacctaaagtttatacacctaaagtttatagacccaaagtttataaatgaaaagtttatatatccgattcaaatttaaatttgaattcaaatattttttatagtatttttatacatttaaagtttatatacctgtttatagacctaaagtttataagtcaaaagtttatatacccgtttcaaatttgaatttgaattatatccgattcaaatttgaatttgaattcaaatattttctatatatagtatttctatacatctaaagtttatacacctaaagtttatagatccaaagtttataagtcaaaagtttacatacccgattcaaatttgaatttgaattatatccgattcaaatttgaatttgaattcaaatattttctatatatagtatttctatacatctaaagtttatacacctaaagtttatagacccaaagtttataaatcaaaagtttacgtacccgattcaaatttaaatttgaattcaaattttttatatatagtatttctatacataaatttttttattttttttactgtagtaagaagagaagaagagtaggaagaagaggggagagagaagggggagtagggggacgggcgggtgatcgctgggcattaggcgtgcccggcaataaagcacactagactagctagagagtccttaattcagatgcaaataccaaataattgttgtaacctcgttaggaaacagaggtatccaagtaccccaacataaccttattatagcatcgcaagtagcacagcagcagtcgcagccttgcatagtacactactacggtacacgcacacatgttccttctattctggaacactacactagctagagctttgcatcagtgcacgcacacacgcagcaaagcccgagtaaagtggccaagtactaggtccttacccagcttggaacgttccatcctcccagcttctgatcctctcctccatctcctctcttctggtgtcacacgtgtattatctctggttctcgctacatgcatgtctccaagcttgtcactctctctctttcacagggttcgttttttttccttttaaagagaagtcttcacaccgtttttttttaagcgaatgcatggaggctctgctgctcgatcggtttctccatgggctgatgtactgggaatggtcgatcacaagttcacaacccagacatgggctctttgagctagttcctcggcccaacaggaagatccatagccggttcctccatagcccgctagtacatcgcgcaaaatttgcgggggaatcaaaccaatctcacttcacttgcatggtttggagcatctccaacagaatggccaaatggctctccaagccaaaatttggctaacttgggtaaaaaatgtgctccaacagacttgctaactggatggccaagctatttggctggctaaattcctcaccacactagccaaagttggccagccaggagggctcgccatcggtgtgggtcccacaccctctctcctctctctctctctctctccctttccccatcccatctgctgctccctccctgcccgccgcgccatccgcccggtgccgccgtcgccgtcctcccggcaccgcagttgtcgtcctcccggcgccacagccgtcgtccatggagccgagtgagaggcggcgcagggagaagatgcccgtggggtcgagctgcacggtttggtggaccatgaggtagcgcagctcctcctcgagaagcgccatggcaagctgcacgacgaccccggtggaggaggaggactcctcgccgctgtaagatcaaagtgtgttttgattcttattctgtgatgaacaattggcatatgtgattattggttttgatatttggagattatcgtcgaagtggttttggagataatcaattttcaggtgatgatcggattcactgttattttatgtgtccagtccgaccgggcggaggttgccggtcagaccggcgctatgtgtgctgtcagaccggcccggcccgcggtctgaccggccgatgctgtgtcggtttcggtttcgggttgtttgtttgaatatccgtgattgtttcatggttatggcttctagatggatactatacgtatgtaatactgttgtttgctaacaataagtcaagttggggatagcttggtcttggaatatggtttctttgtttgtttcatgtgtaggtgactcgatgcctcgggagagtatttgcgttgatagaccaggagtcggcttggtaagaagatgtccgtggtggtcagatatcatgcgggatactaaggctagagttgatgcacgtggttggtgaagattccatatggcatacgatggaggtattgtgtgcgtatgggatacggagtcgaatttggaaggagtccaaatttggtacgattggttatgtaaagtttgtgtcttgtactatagggtttcctaaggtgtttaggactcttactatgagtttggttcatggctttaggctgcctacctcatgtataaatagagggggagcatgaggcttcccggtatcgcttttgagagcaattgagttgctagtttagttagggtttcgagtttagtcgagatttttgtaaggagtgctgttggtgcactttgtaaacacagagagaagcaataaagttgtcatctactttaagagttctttaatttgtgtttcatcgggttcggcggtctaaccagcgacataccggcagtcaggccggcggcaggcggcggtcagaccgacggaggagaggcggtcagaccggcggcgacttcacacgcggcaggcaatcttcaggtggctggaccgacggatcaacaccagtcagaccggcggcacgagctcggtcagaccggcggatcaacctcggtcagaccgatctacatcgaattcgaaggtaacttttatttccactaaaagtttaggtttttgggtatatcaaccattcacctccccctctggttggcttagttcttgtgattcgatcctatagccgccaccgtcgctgccgcgcgcgaggagctcgacggccggtgctttctctgagctaagccaaatcgagtgccaagtccaagaaaggcacgagaggaggaggaggaggaggaagaagaagaagaagaagaagaagaagaagaagaagaagaagaagaagaagaagaagaagaagaagaagaagaagaagaagaagaagaagagcagtcagggcacggggatcagtggcacgccaatgtgggcagcttcttcttcttcttcgatgcagcatctgttcctgctctgccgcctcctggggttctgctttgtgttcacggcgagccagcagcagcagtcggactcgtgcagcagcgccggcgtcgcggtcgcgcatctcgccttccgctgcctgaccgtctggaagcaggaggacttcgtccttcgggtgtgtatgctactgaattttgcagtcctaccagttattggaattttactgcgtaccaatttcatctcggtgaatttttttattttggatgtcattgccaatgcacgcctgtagagtgcaaattaacaggcttggtagttaaatagattagagttgagtaattaacaggctcgcgcgaggtgccgcgccgtcgactcgcgcgggagaaagaggaagaacgggagaggaggaagaagatgatgcaattgacatatggatagagaggctgttggagcgagtaactagtttgactagccaaatcagatggagtgttgactataggtgtttggagagtccgatttggagaggctgttggagatgctcttatatttgcatttcatttttgaaagttttttggtaatttattccaaacaatgggcttcaaacatctattcggcaatcatgggccttaaaatggcccaagtcctattcacgagcggagataagcctacagtagcttggacttgagccttagacttgggcttgaatccccttaaatcaacaagcaatttttttttgagaaaatcaataactcattagttgagctatacttgagcgctaggctttaataatttctggctccaccactagtccatttgttatgtgaatgagccgatcggttcaatctgtgctggttcgatggctttacaagaaaaccgtccagtttagctggctcataagaccgattggcttggtcttgtgaacaaagtgagtcatcaaaggtgctagttttggtttttccagtccaacggccggttcagtcccatcttctttactatgctctctttcactcttaaccacctactccatctcaaaagaaactaacctacgcaaggatgggacacttcatagtataacgaatttggacatgatcccatccttatctaggttggctttttctgggacggagggagtatcatttaattagctatgactatctataacattttcctttcatatattagttttttttattgtaattactttctctgtttcacaatgtaagtcattctattattttccatatacatatctatctagatttattaacattaatatgaatataggaaatgatagaatgacttacattgtgaaacggagggagtatataatttcttttggatggaaggagtattgtagttcacgagatgttaattccgagatagacagacaggaatgagggggcatggtccacggtactgtgccataagcgatcgccaattccaacaaatgacagacactagagcaaaaatagtgctcactgtcttgtccgtaccgtccgtggcaaaaataatattctctgtcgatctattgcaacacgtcagggcagagggcaggaagagctatagcactggcactgcatgccacagccggcaggtgcagtaatccactctagctcgctcgctctgatctcaccgtcagatcgcaaaggcgaaagtgatgtttgctgtgctgatcgatcgactgtccgagcgagtgcatagtgtggccggctgagccgttgggtgggcacacggccggccttatcatctttttgtctttgtggcaatcggcaaaagaccatttctatgcgtctccactttgactgtttgacatgaggcaccggcgaaattctatgtcgaatccctgaatcatcaacttggtgatgtgctggttgatttttacaaggaaataaatgcatgggtacgtacgtctttcaagtcgtcagtaaataccttgtacatattcatgtactttctctgcccacaaatatatataacggtcatcttagagggcgacacgggcgacaaccctcaccctcgccgccaccccacccctctctccctccctccctcactatcgcctgagcaggccgccggaaaccgcgcggctgcaacaacggcagtggctgggcctgcttcaccacgaactcacggaggatgcggtcggtagtcggccagatccagggggtgttaaacaaccgaatggattggatagtgtttcagatagagatgatcctagtgataggattagataacagatgtaatcttgtagtttgttttctgtttcctttcttcttggtaaagctgtaacaaccacatgtaatcgccacgcctggggactgttccctgctatattaacacggaaccgtggtgctgagaggcatccacgttaatctcactttacatggtatcagagccatcttcctctccttcctcatggcgtcatcctcatctgctgttccctctgctccggcgctctcgcagccggtgacagagaagctgtcccgcagcaacttctcgctgtggcgagctcaagtcctcgcgacactgcggggagcccagatggctgggttccttgatggaaccaaggagaagccatctccgactatgatcgtgaagaaggacgagaaggacgtcaccgtcgtcaatcctgcccatgctgaatgggttgcacaagaacaacaggtgctaagttaccttctgctttcactctcacgagaagttctctcccaggttgtagctgtcagcactgccgctggcgtgtgggaggcaattgagggcatgtttatgtcccagtccagggcgcgggccatcaacacaagaatggctctcgctacaacgcagaaaggcaatctttccgtgatcaactacgtcaacaagatgcgcggcctagcggatgagatgaccgccgccggaaaaaagctcgacgatgaggatctagtatcctacatcctcgccgggcatgacttcgattacgacccagtggtttcagcggttgcagcccgcgtggaaccaatctctgtctcagagttgatcactcaactgatcagcttcgagcaacgcctggagcttcgtcaagggatggcacaggcgaacgccgccatgcgtgggcgcggcaatggtggacaacgtggccgcggccgcggcaacgccaatcctggtggacgcggccctgctcaaggtggtcgcggcgggtttggcggcaatcaagaacgacccaagtgccaactctgtggcaagcttggtcacacagtgatcaagtgcttcaaacgcttcgacacctccttcaccggggaggaaaaagctgcaaatgttgccaccacttcgtatggtatcgataccaattggtatgttgataccggcgccacggaccacgtcaccggcgaacttgacatgctgacggtgcgggacaaatacaccggaaatgaacaagttcacgccgtgaacggagcaggtatggaaatctcacacattggtcatgctactgttccaattcctagtggtaaccttgttcttaaaaatgttctctatgtcccggaagccaccaaaaatttagtttctgcatctcgattagcatttgatattgatgcctttgttgaacttcatccctatcatttttccattaaggatcgggacacgaggaggcttctgcatcgcagcagatgtaaaggacgtctctatcccctgaagctgtcctctccttcagccaacaagagtgcctttggtgtccacaagatctcttcgacccggtggcacgatcgcttaggtcatccgtcatccactatcgtccgtcaagttcttagcaaaaatgatttgccttttgttagtgagttcaataaagacatcatttgtgatgcatgtcagcaagggaagagtcatcaacttctctatcctaagtcttttagtcggtctcaagctcctttagagcttatttttttagatgtaaggggtcccgctccaacctcagttggcaggcgttcttattatgttagctttgtcgatgattttagcaagtttacatggatctatcttcttaagagtaaatctgaagtttttcaatgctttcatgattttcaaaaccttgttgagcgtcattttgataaaaagatcctcgctcttcaaaccgattggggtggtgagtatcaacgcctcaacacgttttttcaacggattggcatcactcactatgtctcttgcccccatacacatcaacaaaacggcgccgccaaacgaaaacaccgacatattgttgaagtagggctctcccttcttgctcacgccggtatgcccctaaagttttgggatgaagcgtttctcactgccgcttatctcatcaatcgcttgcgtactcctgtcaatgacggagtcccacctctcaccaaactctttcaacaagtcctggattactcctctctacgcaccttcggttgtgcctgctggcctcatcttcgtccttacaatactcgcaagcttcaattccgatccacccggtgtgtttttcttgggtatagcactatgcacaaggggtttaagtgtttagatgtatcagcaggtcgagtttatatttcccaggacgtcacttttgatgaaactgtgtttccgtttaaagaacttcatcctaacgccggcgctcgcctccaggcagagattttactcctccctgagaacctgcaccagatcgatccatcctcctgtttggaacagctagctgatcaatcggtgcatgattcacctgctactaatgtttcatatgtagactctccaaatttttcaggcgacaatccacagcaagattattcactggaacgtccttttatgggcgctctgcctgctggcgggagcacgggcacaggcgcgctctccggcgccgattcgcctgcatctgtgcctctggatcgtgggagaaaaataaaaacgctgagagacacattgcagaaagaatcgcttatttcaatgttgtaaactagtgagtggtacaggagttatgtggtcactaacccagaacggaaagttctctctccgttccatttcggatatatgaattaaactttcaggaaatccatacacccgggaggtggaatagagcgaagcagagccctcctgaatacacgttccattaatcgaggtgttaaacgatctactctacataggtgtgggcttacagggctagggctcataaaccctttctttcattcgggtcggtcacttttccgggccgggatcgagaagtggaaggggatccttcttgtatggcctccagaggagcctctaatgacctttccacacgcatctgcatcgccggctgtgtctgcgtcgccggctgcgtctgtctcctctgacgcggaggacgcctccgcgtccactactccgtcgacacctggcgccactgcgacgcctccctccactccgcgcgctctgtctccaatccaggggggcacggtggtgctttggagacgccgccgcacgaggacgtgggatcttcaccgagctcagtcgacactgcttctcctgcgccggtcattccgtcgccacctcctccacaacgtcctgtgactcggctgcagcaaggcatacgcaaacctaagagctatactgatggtacagtgaggtacctaaatcttgtcactacttctgaacccactaatctgcatgatgctttgagtaactcgaattggaaagctgccatggacaatgaatttgatgctttacaaaagaacaagacttggcaccttgctccctccactagtggtaaaaatattattgactgtaagtgggtatacaagataaagaaaaaggcagatggctcaatagatagatacaaggctcgcttagttgcaaagggttttaagcaaagatatggaattgactataaggacacctttagtccggtggtcaaagcggccaccattcgtcttgttctatctattgcagtgtctaaaggatggagtctacgccaactggatgtgcagaatgctttccttcatggagttctggaggaagaggtctacatgcggcaaccaccaggttatgaaaacaaagcttttccacattatatatgtaagttggacaaagttctttatggtttaaaacaagcaccgtgagcatggtactctcggttaagtcacaagcttcaagaacttggatttgttccctctaaagcagatacttccttgttttattctaacacaaggacatataccatgtttgttttggtgtatgttgatgatataattgttgcaagctcctcccaagcagccacaacaggacttctcgagagtcttgaagcagacttcgccctaaaggatcttggtgatttacattacttccttggaatggaagtgaaacgaaccaaggacggtcttctagtatgacaagaaaggtatgccatggacttgcttaaaagggtagcaatgcagaatagtaaaccagttaatacacctttgtcatcctctgaaaaactgtctatacacgagggagaaaaattaggtccagaagattcaacaaggtatagaagtattgttggtgcacttcaatatcttactctcacacggccagatatttctttctctgttaataaggtgtgttagtttctacattgtcctactacagtccattgggcagcagtgaagagaatacttcggtatatccaaggaacagtcagtcttggtctcaaatttaatcaagcttcttctatgcttgtaagtgctttctctgatgcagattgggcaggatgcccagatgacaaaatctacaggaggatttgctgtgtttcttggaagtaatttgatttcttggagtgctagaaaacaacccactgtttctagatctagtacagaagccgaatacaaagcacttgctaatgcaactgcagaaataatgtgggtacaaaaggtgcttgatgaattgggagttaagcatccattggcagcatgtttgtggtgtgataatcttggagccaaatatttgtctgctaatcctatatttcatgcaaggactaaacatattgaacttgattttcactttgttcgagaacaggtgtcacgcaagctgttggacattcggttcatcagtactagtgatcagttagcagatggatttacaaaggctctgccagtgcgtcaacttggtgagtttaggcgcaatctcaacctggttcctgtgttgggattgccggggggtgttaaacaaccgaatggattggatagtgtttcagatagagatgatcctagtgataggattagataacagatgtaatcttgtagtttgttttctgtttcatttcttcttggtaaagctgtaacaaccacatgtaatcgccacgcctgggggctgttcccggctatattaacacagaaccgtggtgctgagaggcatccacgttaatctcactttacaggggggccatggccgattgggtggtctctccccgccgacggtccagctgcaggctgtgtgggcacgaggttgcttcagcgcagctacggctggggtagctccagtggtagtggcgatgggggatggcggggacggcctcgacggcgagattcggcgtcatgcggaagctggcggtcgaacaacctactctcccattccctcccctcgtgcttagctgttgaaaccgaatctgagagtggtgcgacaagcgtgtgggctggctagatccagggggctggcagctgttcccgggtggcgatggcatcggttacagaggccgttggttaatggcagtgtgcagggaagcaattgctcggcagtgactcgtctccttcttgtcagcagtcatccttctctccttggagctcctcccctcctatgtccagactactctaggtttggtcgtgggcagctcaggggaagggtcgaggcgcggcttgcacaatcgggaatgacaatagcgtggaggtggtagttttcctgttagctttggcctgagacggcaggtggtggcttgggctttggaggaacgatgttgtggtttgtcggtgatcctttttgctaggcctttggctagcttgatgacgatgacatctttaggcgttgtttcccttcttagaggtgttattatggtgttgttcttcctcctcctacattgatctccaagtgaaaaccttgttccggatgagcggtggtggtgtttcacgtcgcgtccttcttgggggcaccgctttggagaaccttacttgtggtggccactggtatggactgctacatcagtttcgaagctcttatgcccgagcatgcttgacgaggtctttgtcttcacttccttctttgtgctctttgtttgactttgctaggtggagtcgaagctgtttcattggctgtgtgacgaagcttggcaacgatgacaccctgcagcctctttctaagtgtgttggtgcctacagtgtgcagtaggtggtgctttgggggctttggcagtacaatagaggaagtcgaagctgcttgtctgttttggcagtgagtttggcaaagatgacgcgcctgttgtgaagccaaagctattgtgttgctaggcgattaagttggcaacgaggacactttgttgctaagtcaaagtagccatgtcgcttctacagtgagcttggcaatgatgccccaccttgagttccatcgttttgtttttcaagttgttagtgggctggtgtgggtgttggtggtggtgtgttatggtagtcatggtttttttctcagtttttcctaattaattgtgcattgtaacgcttggtctcgtttctcgtttcttctaaaattgggacatcttcttcttatatataaaacgtcggcaacggcctaaccattaaaaaacaaatatataattgggtaacccactaaactaattaagcgagtaacccgtaagtgggttcacgggtcagcccgcttgcaccctgaggtccaggcctcataatttgaacgtctaccatgcctagcctaatgagtttttaaaagagtgaaatacataacaaaccctacatatatacgaatgaatttgtggcaaacgcgcgcggcgaaggtagtgatagcacatggagctgagggaggaccggcctgggacgatcgatcgatatatcgagagggcctctagctccttaggctttttgcagatggtccatgaatgcgagacggtcggatagacgagagagcagcagtggcatatcaaattacacatgcagaataatattgatgcagtgggtgggtgggtgtgtgtgtaccagcaggcagcagctagctttcttggtccgtaggtgacgcaaaggaagacgctagctaggatgggccctgcacgcgactgcgagcgagcgagagctatatatgcgtggtccgatcgactggcccggccggccggcgtaccgggcgtgctttcggtcgatccgacgcgcgcagcatcgacccgtcgtcttcaccacggacggcgccttggccagcgcggattccccacccccccccccccccccccacacacgcgtgcaacaacttgatgctcgatcactctctctctttccaaattactactccctccgtctcagatcgaagggcaagtagtatgggcatccaagcacaatcttctagataccacataagctaaaatagtgaggtagagaagagatgagatgagagagataagcagcaacctctcatgcaagaggcaaccacttcccaaaattcaagacaaaaggagagatgggaagaacaaacattagggctagtgtattagaattagtatagatgtgatatattgtacatgttacctctatatttatttgttgatgatgtggtcaaaattagatgcaacatccacatcttttataaaactgtctttagaggacgtgcttttttttggctggtttcccagtatatatacaaggcgtaatttcaatttgattcactttctcccgagattaccctttcctgatgcatgcatgtaaactgccaccacaaatgcacataaagcatgcgggcatgcaaatgaaccaggccttccacgttcaacgaagcgattggattaaatgcatatatgcgtgcgattatttaggggcatgacagtaactaactcccttgatgctctctctctccttgtatattaatataaagttgataccgactaacttctaaaacacaacatgcaaccatgtaatatcatcacccactagcaataattatgtatttagcctcatgcatgcaagcataaaacataatctatgttttattaattctacaaatcaacatataagtatatctaatcatcacctctcacattatgttcataatattttaacaaatctatctatctatcatttttataatatttaaaatacacttatcaatatttttcccattaaatcacgagtatcatttgattgttttatgataagtattgataaaccctcacatttctttttttttctttttatttatagctcgattgtcaaaaaaataaagtatattgaaaattgcttagtaattcccgcagcaaataaagcatggggaatcacctagttagtgaaaaaagatgtgtgccctctaattagggacatagggagtatcacacaagagttcataatatagatttatttatttatacgattacaccaccacactcacacccttaacgcaggatgttagatatggaaaccagcaacacatctttaatctcactaatttcctattgaaaatctacctctatgtgcacaatattcgtatgcactagagttattttggaaaagacggattagggtttttatatccggggtgattatatatagggttaattggataatatcattatagcttctttgattttaaacttttaatttggtatgtagagctaataccacatatagagtggtggtaataattatttattgcaatatataactttttaccacattcattttatggcaatatcaaaatttattataactaaataaaaattgttgcaataacctattaccaaggctagcaacgattttaagattgtgataacatatatatctattatattgtcacaattttatcattgatgctgcgatttttttcgtggcaattgttgacgattgaggttgggcagtgacgacgcatgagacagggcggagcgctcgtgcacgtgaaaaaatcggcagctgcacggaggaagggatattagggttgggatattattgttgcacgaatctcataacaatctaaacagtccgtagttctcaagatattttagtgttttatgtcaaatgctatatattcagtcacttataactaattaattttcctcacttgacgatctaaaaaggggcatttggctggttgcatgcatgagctatgtatgtcaccggctggcttgagacgtgaatcagctgtcattgatgttgcaaaaatctaccactactccaatggcgggaaattatattcttaagggatctgtacgtgctagctggctatctatctccttgagaacagcccatagtggcaagaaaaagattgaggtgaccccaatcactaacggactactgacgccctgcattcatgaaataatcacatcgatcgcatcttcatgggacaaagctgctgcctctctgcatctttgttagagatgacatcaccttagggttgctccttttatagcattagctatatgtttgatcagggtatagtagcttgatcttcggattgtatcgagttgtggattagtggtattatgctccaaccgttgtctataactcaacactcacgggtggagaaagcgtttgtagtcccggttcataacccccctttagtcccggttgatcgctatctttagtcccgggtgaaataaccgggactaaagatcgagctgaccttttttttttcatggccctgttgctgcatggtttatatatatatatgtatatgtatatatgtatatgtatatatgtatatgtatatgtatgtatatgtatatgtatatatatgtatttgtatatatacatatatatatatatatacatatatacatatatatatatatacacatatatatacatatacatatacacatatatacatatatatatacacatacatatatgtatatatgtatacatatacatatatacatatatatatatatatatatatatacatatacatatacatatatatatatacacatacatatacatatacatatatatatatatatatatacatatatatacatatacatacatatacatatacatatatatacatatatatatacacatatacacatatacatatacatatatatacatatacatatatacatatatgtatatatatgtatgtatgtatgtatatatatatatatatgtatatatatatatatgtatatatatatatatgtatatatatatatatgtatatatatataaaccatacatatatatgtatatataaatcctaattatcgcatataactagcatatgcatgatttaaaattgttaaaaactctaagtaacatatgtaaatgccacatgtatgacttaaaacttttaaaaattctaattatcgcacataactagcatatacatgatttaaaattgttaaaaactctaagtaacatacgtaaatgccacatgcatgatttaaaacttttaaaaattctaattatcgcatataactagcatatacatgatttaaaattgttaaaacctctaataatcgtacgtaattaacatataccatacaacaattgatttatatggataatcaatacatccaaaatagtttacatcgtgtacacaataattacggcaatacatcggcggtgacggttgaccgcacgtactttctcctcactattgttccctccttgtgatcgctgcgtgagtaaggggcgtcttcatttgataggaggatgctagggtcaatcgtaaccgtgaaagggggttgcccatccaactgatcgtaatccgcgtcagtcttgtcctcaattctgacgatttttcttttgcctgtgagaaccacgtgacgcttaggctcgtcaagccctctgcccttctttcctgtgctagacatgtgcttcacgtaaaagacttgcgctacatcattggcaaggacaaaaggttcgtccaagtatcctaccttattaaggtcaaccgttgtcatcccactgtcatcaatcattacgcctccaccagtcaacctaacccattggcactggaacagagggaccttaagaggaccatagtcaagttcccatatatcctcgatggcaccgtaatacgtgccagttgttccatcgtgtcccatggcatcgatacgaacagcgctgttttggttcgtgctcttcatgtcttgggctctcgtgtagaatgtgtacccattgatcccatatccctggaatgtcgcgatcgacccagacggtcccctcaccaggaaggcaagttgttggttgatcatctcgttacccatgagatgttgtcgtagccacgcggggaaagtatcaatgtgatgccgtgtaatccatgcatcggacttaccgatgtttctggcgcgaactagagccaagtgctcctcgatgtaaggagctaccaatgaagattgttgcagaaccgtgaaatgggctttacggaataaattgttgtctaccgtcattattgttttccttccgagagttccctttccccgtagtctcccttcatggcgtgattcaggtaccccgattgggcgaaggtcttcaataaattctacgcaaaattcgatgacctcctctgttccataccccttggcgatgcttgcctctggacgagcacggttacgaacatacttcttcagaacgcccatgtacctctcgaaaggaaacatgttgtgtaggtacacaggcccgagaatactgatctctttgacaaggtgacaaagcagatgcgtcattatattgaaaaatgaaggtggaaatatcaactcaaaactgacaagacattgcaccacatcattctgaagggcttctaatctatccggatcgatgaccttctgcgaaattgtgttcatggatgcacatagctttattattgttgcccggacattgtttggaaggataccccttattacaacgggtagcagttgtgtcatcaacacgtgacagtcatgagactttaggtttgtgaacttcttctccttcgtgcttattattcgcttgatattcgtggagtatccagacggtacctttatgctctccaagcattcaaacatactttccttctctgccttactaagagtgtagctggctggactcaagtaatggcttcctttctcctttggttccgggtgaaggtcgccgcgttgttccatatgcttcagatcactacgtgcttctagtgtatctttcgactttccatatacacctaggaagccaagaaggtttacgcaaaggttcttagtgaggtgcatcacgtcgattgcgtggcggacgtccaagaattcccaatagggtaactcccaaaatatagagttcattttccacatcgccgcatgaccatcttcgctctctataggctagcttccaggcccctttccgaacactactttaagatctttaaccatagcaaacactatttttccgctgcgatgtttaggcttcgtacggtggtccgccttatgttcaaagtgcttgcctttcttccgtaccgggtggtttgctgcaaggaatcgacgatgacccatgtacacaaccttcctacagtgcttaagatacgtactttctgtttcatccatacagtgagtgcaagccttgtaccccttgttggactgtccggataggttgctaagtgcaggccaatcgttgatggatatgaacagcagcgctcataggttaaactactcctgtttgtcctcgttccacacggggacaccttccttcttccacaacagtttaagatcttcgaccagtggtcttaggtacacatcgatgtcgttaccaggttgcttagggccttgaataataatcggcatcattatgtacttcctcttcatgcatagccagggggaggttatagatacacatcataacgggccaagtgctatggccgctgctcatctctccaaaaggattcatgccatccgtactcaaaccaaaccgtatgtttcgtgcgtcctttccaaagtctttaaattttctgtcgatgtttcgccactgcgaaccatcggcggggtgtctcagcatcctgtcctgttgacgctcttcagcgttgccatcgcatcattctagcattccccttgtttctgaacaaacgccttagccgtggtattatagggaaataccacatcacattagcaggaatcctcttctttgttagttgcccgtcaacttctcctggatcgtctcgtctaatcttgtatcgtagtgctttgcaaacagggcatgcttctaggttctcgtactcctcaccgcgatataggatacaatcagtcggacatgcgtgaatcttctgaacttccagtcctagagggcagactatcttcttagcctcgtacgctgtctcgggcaatttgttttcctctggaagaatgttcttgacgagtttcaataaatcgccaaatgccttgtcactaacaccattttttgccttccattgcaagaactccagagtggtatccaactttttgtgccccctgctcgcaacctgggtacaacgacgttctgtggtcctctaacatcttgtccaatttatgggcccccttttcactttcgcagtcctccttggcgtcctgcaacatctgaccaagatcatccgcaacgtcgttaccatcagcatctctttcctcctcgcccgtttgacttccttcaaatccaacgtattgagcaaagtccggaatattgtcgtcttccacttcatctttttccatttcaacaccttgctctccgtgggatgtccaacaattatagcttggcatgaaccctgattcaaacaagtagaaatgaatagtcctggatgcagaatactccttctgattcttacacttattgcatggacaacaaataaaacccttatgcctattagcttcggccactctcaaaaaataatgcacgccgtcaataaactctttgtaccgccggtcagcgtacatccattgccgatccatctacatgacataaaaaaaatcgtacacaaataattattcttacaataatgacagtcatacaataattataaaataattacaaactctttcaacagtcatacaataatgacatatcattattcatacaaaaatcataaaatgttataccaaataattcttatttactatttctaaagttttaaactaatattaatttgttttacttcttttaattttcattttagtttgttttctattatttaagattaactttcactatattttccttctcaactattttataaaaccttctttagcaaataaactaaatttctatatattctttcttctccacacaaattttctctctcatcaacttacaacaaaattttggagacaaaaaaaagtgtgcaaaacatagctccaaatgtaatatgacaaaaaaaacattggaggatgaagttgctaaccttttaggcacctccgatttgtatataatcaccaaaataaattcactataaattttggcatgacctcccctcttttttgaagaaattttgaagcttgctcgggcagctggaggaggaagaagacatatatataggggtgggactttagtcccggttgactaaagttacgatctttagtcccggttggtgtgatcccggggggcttgacaggccctgacagcatttgaaccgggactaaagatcaaatatgtccgttaccctttttaaccgggactaaagatcatctttagccccggtttttattgcaaccgggactattgtggaattcggccgaccgacgaaagatggtttctccaccagtgagtagcgctctagttatgtccctagaagaggattaatttatctctcttttttttacatgatggattagtggtattatgctccaactaactctacttccagttgaaacaaaaatggtccatgcatgcttatcaactcgctctaccatcctctttaatttctcatggagaaaaaggaaaagtgaaatagattttgattggcatgcatgaattcagatcaggttgcagttacaagtgtaactgcaagttaacaactgcacataactttaaccatccgttttcatgatcaacggttcagacttaacgctacggtaaccatgtaaacagaaccgtgctacagtatttactgctacagtgctataaacaatacattgcatgatctgggccatccagtttgcatccaatgtgtgtactgctacttaagttaatagtgactgcacctaagccaagtccagcatgcatgttagattttttttttatttagtactaaggaaagatgcatgctctagaaccagatcatatcaaaatatcaaaatagctgctttacgtacgtggagaaaaggagaggggatcaagggggagacatggagcatgtcagagcagcgctgagcgatgcatgcagctgctgcttagcctacgcgcgcctgcagcttttgcatacacctgcttgcatgtctctacctagctagtatgggtaagctctagcttaagtcagagcaaagcaagattgcacactggtgttctccactaacacccctccctctctctctctctctctctctctctctctctctctctctctctctctctctctctctctctctctctctctctctctctctctctctccctgttgggagacaaagaccggctcttctgggacaatgatttatgcgtcatggtctcccactatttaccagcagcgctccgatggaaacctctggccaccatcagcatcagcaataggatctttctcactttcatctcacctttattccccctctgtctctctctctcattcatttacatgttactccttaattcatcctcgaagaattacttgtctttgtagatcatatattggtctccacaacatattccctctgttccaaaaaataccgattcctagatgcccgaggtagttttagcgatggctgctgaagaccaaaatacccttacacaactacacaagtactacattcaattcatctttcaaataaaaaaagcaacaataggcaaggagattccctcgatccctccgtcactaccaaccatccacatacaaatcaccgccgacgtcatcatcgccgcacgcagctgatgccgacactgtcgcaccaccgaacaacgcaccgccaatgctgacaccgcaccaccgatgccatgccgcacgtaccctccggtgtcagatccatcatcttgcacaccttcgatggcgcccccaccgccttgtgcatcacatccgccgccttgcataacttcaaagccaatgccgcatccgagccgcctccacccgctgccaccaacgccgctagagagccgaacccttccgccgccacatccgcgtggtcacgccctggtggatgcggagaagcaggagcgagggggagaggcatggagtggagagggagctgcagggaggagcggtagagagggacggagcggggagggggaccggtggtgcctcacatccggcgacgaagaggattcgattggggattttggggtgcgaactcgcgagagagagagagagaaacgcctgggaagggataaggctcgatggtggtaacgtgaggaaagagaggtcatgggcccatggatgtcctccatcggtatgactttcctggttttctgcgtaagagtcggttttttctgggacaaactcccccctctagaattcgacttactccctctgtcccataaaaagaggattcctagcatcccaaggtaactttagtgagatgtaaaaagaccaaaatgaccctcatcaatgaaaaaagtagtaattgtaataggtaggtaaagggtatttaagggataaatcttctcgttttatgtgctgaagataggtaggatggtcgaagttgttttttttaaataaaatttaaactttagaagttgagttttttttggacagatggagtactccggattggtgaaagagtcacggaggttctcagttgggaccagtcgttgctattcagttggttttgggcttgcatttttttctctattttctcctcctcgctctcctacctgtgcacgcgcacctactcgctggtttttagtaggctaaagaattatctggtttaatcgggttttactagttcgattacttaggaatgttttaattggacataaccgtttgagggctttggttccattttttttgtcagacggccggtccggtctagtcctcataatttcacataaaacagtttgatctttgcaacaagcacgaaagaagatcatgcatttcaaatgaggttatattatggtatatatgagctgcaaacttattgtttttgcacaatcagatgtacacttgtaaaaacaaatttgaaaaacattgtttagtaaaaataaacacttttgatatcacgtgtttcaccctattttatgagagggaatctatatacctccatcgataagttcctttacagtcagattaggtcattaggctcgggacaacacggtcggaggcaggcagatagtgggggatgaggaagggtcgcctatggcatgggttagatggaaattaaggtggtgatatatatacggagacttggagagttaaggtcggtgtactgtcgcggttagtaaaggatgttaggcagtagtggtgaacctcgttttcagccatcgagcccgtggccagtataaagcacactactacaaaacaacatataagtatcgcattatcagtaccgataaaggtttcttgtcctctcagacccgcgtgctcccaaagtcccgatcaatattggttcctatccagcactgatgaaatacgtatcaatattggttcattaaaagacttggcaattatgttattaatgtcaggtcttctaaacaatcggcactaatgtgtgagacatcaatgtcggtttattaaatgatccaccactcatccaagccgagtcgagcaaatgtcaagccgatgtgatttcagttaaaaaaaaaagaacaactgagattttatccctgatcattctcactcatctcttctattccccattctctcaccctcactctctctttcttttcctaacctctcactctccccatcttggcagcggtggccaaccttgcaagcatcgacgccagcatcacggacaccagcagctaggctcacgggcgatgacggccacgactgcctcacaggcactagcggcaatggctaggcttgtgggcacgaggcactggggcctcccattggtgacgaggcctaggagcccattgtggttgcttcccccttgccctttctctcaccatgggccattcgatcgggctgcctgtaggtcgagggccgccggatctgacctcgctcgttaccctgcatccttccattgttgactccctcctcaacgtccctaccttccttctagctgttgcggcgttgcatgcattggggatggaggttgtccccattcctgggactaccacgccgatggttccttctccgagtataatccgtgttgcaacctgtgctttttcttggaatcgtttgtagattcttgatttttttttcccatatgttttcatgaacttgcatgtgatatgttgatatttgttgattagtctcgttcgacttgattttttttatgaacatgttgatgatcagttggtggtgtgatgtattggtgatgataatcttgatctggatgtgccatatttgtctactattctgtgtcgacttagaagatctcgggagatctggggttctagacttctggtggccgctcaataaatcagtcgattcactacttatttggctcgtggaaaccaatagtgccgattctcaactcggcactggtgatcaacatatttggtacggtattaaatgatcatttgcatgtgagatgtgactccctccctccctccatgttttcctgtggagtatagcattaaataatctttgcatgtaccctgaaattcagaattaaaaataaggaatattagaagtagagtatagtgtccatatagaaatacaattaggaaatgatagaaatttggaattaaaaataagaaatattagaagtagagtatagagtccatatagaaatacaattaagaaaaaaaatacaaattcggaattaagaaaaatgaatattagtagtagagaatagagtccatataggattttaaaactaactaaaatttggaataaacataatggaattaaaagtagagtttagagttcgtataaaaaatacaatttacaaataactaaaattcgaaattaagaaaaacatggaaagaagagtataaagtcaatataggaatacaatttagaagtaacttaaattcgaatttaaaaattaaaaaatattgaaagataagtttagagtccacatagaaatacaattagaaataataaaaattcagaaataaaaataaataatattggaagaagagcatagagtctatatagaaatacaatttacagaaaattcggaattaaaaaaatatattaaaagacaagtctagagtccatataggaatatatataatttacaaataactaaaatttggtattaaaaataattaataactaacacatatataaaatacaatatgaatattacacattagtagttttttaaagttattgcaaaatttaaaattatattgtcattttaatatatttgaataatataatgagaaaacatatatgctattatatgagagaaaatataatgatgctaaccgcgcaatctgcgcgggccaccatgctagttgtaattataacaagacatattgagaagatgattggggagttatagacgattaacatggactcaccttaattaaggattcctgcacttcacctacaaatgatcgagtccttgtagctcaaaagtcccacatggcaaatggcatggatggtgtggtcccatggcatgcatgtatgataacaccccatggggatgagatgagcatagagagggtcactcacaaggacattatggtaaattcattcagcggccgcacgtatcgcaatatatgacgtcgcacaggcataaagatctcctcaacatatcataaccctgctccaaaacacgagcaaattaattagcgcctcatgctcacctccactcctccactcttctccgccatggagcaccaccaccaccatgtcaggccggacggcgagctccggctcctcctcctccccgccacggcacccaccacgccccgcgacgacgacggagccgccgccaccttgttcccgccggcgcagccgccgcgcgaccacccgcagctcgacctgagcctgtccatccgcattgggccgccgccgccgccgccgtcgcacacgcgcacggcgacggcgacggcgcaggcgcaggccggccagcagaagaaagcatcagcagcagcgggcttcgacgacggcgacggcgacgacgtgcgggcgctgaagcagcaggcggcggagcaggcgcggctggcgtcggcggagcgcgcgtacgcggagcgcgtgatggagctggcgcggcgggagctggaggtggcggagcgggagttcgcccgcgcgcgcgccatctgggagcgcgcccgcggcgaggtgcacaaggtggagcgcatgaaggaggtcgccgccgctcgccgcatcggcgccgccgcgctcgagatcacctgccacgcttgcatgcagcgcttccactcctagcgctaatttttaactaatcaacctcgccgtcgccgtcgccgtcgccgtcgttcatctccatcgtctccttccttggtacgtagccagctggcacgccacgtagcatattggcgatacgtacgtacggtactatgcatgtacgtgtgcgtatacacgtacgtacgtacgtacgtacaccaagcctcgacgtttgctggatatggctgtacgtagttagttcgatctgcacactagcttacattagctgctccttttgtttaattaatttagctaaatttcgtgtgtttaattaacgtgtgttgattaattcagccttggctactacactttatgtgtacttgattcgttgtgcaaacagagagtataaaggattttaaagagatgtgactcgtgatacgagaatatatcacgtctctctaaaatttcttatatcatggaagaagtttatgctgcacgttgcttaaccttccatttgcttgatctgctgctgcgtgcatgttgtggttccatcgtacagtggccagcccgaaaagaggtaaggaatctagcagcagttgagctagcttgctttattactacgtactaattggtgctttacaattcgggtgcgtgctggaatattgttatcagcagctactttcattagcaggtccaatctttcgaaggtgataattgatagaggtagaatatatatatatatacacacacatacatgttaatttgttgatgggtgagtttgtacgcgtgtattgaactgcctatctccgtgtttagttctaaagttttttcttcaaacttctaacttttctatcacatcaaaacttttctacgcacataatcttttaacttttccgtcacatcatttcaatttcaactaaactttcaattttaatgtgaactgaacaaaggctatgtctctctacggtaaaaatatctatacacgtgaaatgagtgtatctcttggttgattaggttcttatggtggaacatatttgctgtctgactttaagcgctggacttgataaagtgctcgtatttgactagctatgtgtgacttaatctcaagaggtaatatctgcgcgcacatggtatagaaggtgagtttggtggtaaagcgagtacctacgctagattaggcttgcaatctcatttagaggtttgttaggaaacatcctgtaggtgtttaggagcataagtatacggttgcgaaaaaaattaaaagatatgtatgatactacctctttttaaaaaaacatatgtatatatattttagattggcatagatattaaaaaagttgataaaaataattggaaatatattgtgtttggtttagaagatgaagtaagtgattaaattaaagggagaatggttgtaattggtttagagtaaggggcaggtggaaaaatagcttcattttgagacaagctattgtgttagaaatagctacattttgagatagagaaaatattccctccattttcaattgatcatcgtataactttttgaggttatttttaaatgatcatcatattaggatttgttccttaagtcaatttttatttatgcataagagtaaatgagcattggtgttgcaatatcttggttttttattgactaggaaaataatgacgattgtgtatacattgagtttgttaccagagtaaatatatacatgagtgttattggctttgcttggtctttatgatctcttgttatataatgaccaattgggaatggaggaagtaatagttaagcaggttttcttatttttcgtgtatttactactatccatgatttcacgtgctaggctcatattagatcatgttctgttcggattgttaaaacggcttatttatttcacttcgaaaaaaagtactatctccgttttaaactgtaactacctagtacaggatgtgacattacttaatgtcacatcctagtacatcctagtaatactaagtagttacattttgagacggatgaagtatttctctattaaagccatgtttagattctaactttttttcttcaaacttttaacttttctgtcacatcaaattttcctacacacaaacttccaacttttccgtcacatcgttccaatttcttcaaacttttaattttgtcgtggaactaaacacagcctaaaaatttttctactgtatgatttgtactattcgtttcaagatatttgttaagtttatttaataaatacttttttatctttatagttaagtagataatttgtgttaataatcttaaccaaacaggacatcctcgacgtgggtgagagtgttggattatctagttccacttttttttaaagaaaaaaaattgaacattcatctcgatttatgaaagacgagcggaacagagaggggtgggtcgatgtcagccttgtgaaaaacacaggagggaaaagctagacaaaacgaccatgcaggagtagaaacagtaagccgcgagcctctgtttttctctgtttgctcttaccgatcaacagtttgcgacccctgcaaaggagaagaaagagaaaaaggatacttacaaatatgggcatgctgctgcttgctgcgtaggactaggagtatgcagatgcagatgccataacgcaaattgtgcagatgctacatatcacttcagtgccaggatgtcggcacacgaaggatttcttctgtactgccgctacagctttgtcattgttcttcctcctttctcctctcgttaattagttccagatttctggaattattgggcttgcaagttgatagtttagatagctaggatatgggacggaggtagtaatccataatgaactcgctgagatttgttttctcgggcaagatctcaataaaggagattgcgatcctccaatgtaacttcccactaaattagtggctgaagcccacatgtcagtcacggtgaacagtaatgttaaaggatcctcttcccaataagggttacaaaatggatttaaattctccacaaattttaactacgtttgaagaaactcgatgttcaagccagtagataaattttcatgggtccgagatcaaatgcagaaatgcctccagtctcgttattggactacaatttcttcaaggaatatagcaacttagaaaaaaacatattgtacttctaggaaaagattagatttcagaaattgtccaagaactttcttgctggattgttccattctagtcattgaactccattatgagtgttctcagcttgctcaatcgcaacactactagtatatacatagctttttttttccgagcaaaaagtaattcactggtaagtccttataaaatttacagaacttggagctagctacagttcagagatagacgacctgcagttcaattcgatcagcaaaaagctgatagcatcttgagtactaaagcgcgatgattaggaaccgggaagaaccagcaattaatgattggggcgttatgtgtgtgtcgcgtggaatcatcatgtgttcatgttcatgttgtgatcgatcgagaccaaacaagcatcaccgattgatgagatgatgatgatgagatgaacaatggcttgaaaagtacttcactgacatgctgacacggaaccaaattaaagagatcgatgtactgatcctacctagcatgaaacacagcaaagcacagcccatgtgcaacttcgtgcctttttgcgattggaatcttgttctcacgttgggctcggtttgtgacctgtctctaggatttttagtcgaggctagggatcacgatgtttctgttcttcagttaactgcagggtcatctctttcagaccttgcctaatcatgcatgcatatgggttgccgatatgacggagttgttgattgttacggaattagtttcactgttttggggttaattattttcctctgtcgactgataacgaaattgcagaactggagaaatttcacttctgcaaaatatatcggttcagaagaacataaggtagcctcaattgctttacagtctgcgaagttgttaacaggaactttgtttgagtactgtcaacttttttttttgataatggaaataggttatatctccggcctctgtccataagcacacagccaaaaggtccataagtgaacagaaaagaacttgaaaaaggttaagatgggacaaacccccaacttctgccgataatatgatctactgagataaagttttcttgctatgaacttgaagttgagtgctgtcaacttgacatgagaaaacaaggatgatagcaaaattttcttgtcggccgtgcaaagatcctgaatatataattataatcaatggagcactgatcacagtaacatgaatgtgcatattcttgcgacaaaacatgcatatagatgatccaaaaaccaggaacctgacagacagaaacttacaggtgaacaactagcttggttgctaccaccttatcacaggacacaaggaaagaaacaaaggagaagcagaagcagatggcccgagttcagatagaaaaaaaaggacagatacgatgcatgcatgccatgcatatatgaaaatctggatagagttagcaagcagaaggccttataaagatcgagttgatgacatactatatcttaaacttaaagcaggaatcatcactctacttagccttctacatgaaaaagctacagaatgaagagcatccgatcctatgagcaaacagaaaataaaaattaagagatcacgcgtagttagctagctgcacacgtactcatcagttatcagtgccatcttgctgacgaaactaaagaggcacaattagactagctatctgcgattctgaatgcatggtaacatgtaacttagcttgtcatgcatatgcatggtggcgacaaagagatagctactagaaagaaatcagagaccgaggctcctcggatcgatcgggacagtgaatctgtgcgaacactgcaaaggtgatactgatcgatgataaggcacttgggagttgggactagcatgagtgactggaggaggtgcgcatgtgggtagtgctttctagcatgccctcgtacgtgaaatcaaggtgttgattttagttaaggtgataaacaatcaccactacagaacaattttcacggacaacttctttcttttcacaggagggcgaaaatctccgtatatgaaacgatttagaagctacctagttaatacgtagttaagaccacttgaaaaaaaaatacatttttacacacaaatagttttcttttcgtagacggacttattaagagatccacgtaaaaaaatattcgcaggccatctttttttccttttaactcttcccaactcctttctctccctcttctcctctacttttctctccttatcccttagcttctctacttctccctctccgcctcctctacttctcccctcctctacttctctccaccagagatccacttgcgaagggaacagccgacgggacggcactgtaacgagcgaatctgccactagcggcatcggggaggggtggatgcgccaccagcggtggcatcgggagctgcaaggcctcggcggtggtgggtgggagctacggttgggttattttttcgcaggcggcagcataactgaccgcccgtgaaaaatgattttctcacgagtttgtcgccgtttggaaaatgtcgatttttatagacatcttaggggaggcgagtcgctcagccatttgcgaaaatcatttttatagtagtgaattgttaaaagtaattaataaattgttatgttggtatttgtgaaatgatgttgaatttggcaaagtgtcggggcaaggacggtctaaccactatggggtgagcagttagaccagaagtacatagcactactaggaaaagcattatcgcaagcggccgaaaaggatctttgcaggcgaggtggccgtccgcctgtaagccaacgactgtgaagatcgccgatcttcgcaggcggggcggccgtccacctgtgaagataattttcgcaggcggacgttggctagtccggtccgcctgcgaaaaaaggaatcggccgcctgcaaaaaaaaaacttccgcttgtgaagataggtagaaaatattgaaatttaataataatttgcccgtaaaatacttttaaattatttaatagaaattcttgtaggtagattattatgtacatatattggaaaattatcaagcatttggtactgataaatgtacatatattacattactcaaaagtgttgccaaaatatatatattacaatatttttttacattgtcacttcaaatacgccatctagttaatacataatggcatagcactgttccactcccgaagattcttgaattcgtcacttgtggctagggcaccctctgggtcgaagaaatctcctttcacatgacatcttatggtggatgaagtgacacagatcacactggacattttttatgcctgtatcgtcaaagcttgttcgacattgtaatcttggcaactgcatgcattgaagataaacaatatattagtatcataaatatatgaagttgtctagcacatagtatagagacttacatcctccgcgttagtcctgtacctcccattaactctaaggaattcgcaagcgtaatacccgcaaaggaccgttccttgcggttgcttgtgacacttcaggacatatcataaaagatagttaaaatttgcaattagtgaaacaattggtatacattaagtgagtggagtattaccggccaataggtacgtactagcagcttctcccttgttcgggtctgttctccacccttgaacttgtagtactggtacgcactgtatggatgtcgtaccgtttcacattaaggaggatatttatttataatacattcatataagaatgcaagagtcataatcacttactactgtaagattgttagaaattctttgtatgactagtgtttataatcgagagggtccaagactaccacggttccgtctttagggtggatgagtaaacagatataatgatcgctacatattaacaacagcatagttagttagtaccagctaaaataagacatatgtgcagaagataaatgtacccgacttacttaaaattataagcagccatgacgactctcttattttggctctcttattttgaaagtgcaagaaggctcgtccaatgtactgtgcgacagtaatcaatttctccttgtgcaagcccttcttgtattcagctatctcttttggagtcttgcccttcagctggtctgaccctggtgctagcctcatggtatgttgtgtttggcaaatctgagttggatccaagaagccgataggttcttttgtcttcttagcatccatgtattgcatcctacaaaagaagtttgttagtaacaatcacatggatttgtattgtacatatttttcatataatcaattaaaactcatactcacatgcaccaaacaccgacgtagttaacgtccatcttatcccgacgatatatggcgtggagatctgagaaatctagccatacgtaaccttcttcgccaaaacaatctgccgatgatcgagctgttatattgcccaagcctttcttgctggcctgcatgtagaaggtatgtaaccttttcatctcccatggtacttcgttcagtgcccattccggcaagagtgttttcccatgttcgtactcagtcgggcaatcatcggttgcgaagtatgttggcccggctagttcagcggccttctgggggtcatcatctctgagcttggcacgttccttaccccctctgaagacggttaccatgaacttctccttgttctcatctttggacttaaagtcgtggctcctaagcactctaggcatctcagaattggtagtggccttctcagggaccatggtctcttgcacctcggggtctttcgcaagagaaggatcttcaaatatttctggctctataccgtcccattccaatcctagtacttcttctatttctgacccgactgatgccacaaattgcacctctggttctgccactgtaatctccatgggcacttccggcactggaatctccatggctgcctccggcactgcaatctccggtggcacttccggcactggattatccttttgcatatcgggttcctccgccttatcagtcaccttcctcttaggaggtctcggaggttttcccaaccccggttttggcaccacaggtttttccgtggcgtcggtgcccaatccaaaggatacgtcattcttgtgccagagaattacaagatcgaccgcatccccaagtacggatacaccatctgcagtcgggaagtcaatgtcataggattcaaacccttcgtggaccacttgcggctgcaccttggcatatgcatcgggtatgaactcttcgttgtatgttctcccaaggatagcaatggctgtagcggcctcaaaagttttcccggagcgtccaatgggaacgtgcaatctgcagggcgtattctccttgaggtcatcgaagggttaatctggctcaggttctttggtttcggggcgaggcaaaatcatgtgcttgacgcagaaatccatcatttgcctttcaaactccgcagccccttcgtctctaagtttatccttgtacgcttcacgcttcttgtgggggtcatatttgaacccttccttccaactcatcttactcgacacacctcgaacccttcccccatgctcaggagtacccaacgccgtacttagcacatctttctccctcttaggcttgaaaaatcctttcttctgtgaactggataaattctctattttatcagcaacgctctgcagctccggatcttcaaacgatacttttccttcatccgtgatcttaggagttctagctcttacccagttccttgatctctgtgtccattcctccattggtactggttgccccttcttcctcatttcctcctcctcttttgtccactgctccacctttggtgcgtatcccgcggaacctaagcgatgaggaaatttgttcttcttggccaactctgcatacttttggctcctttgaatttcttccggggagttcttcaacgccagaaagtcgtcccactgattcggggttatgttggcatacatcgaaaacggtgtgcgtcccgtcttgacaaattttgtgttcaagatggttttccaaccacgccaagacttggccattgtttgcagtgcacaattcctcactgctgcctctgatccattcgggaactagaagattttcttcaactctttccataggacttccttatccccattcgatacatgatcctagtccttcaccgtgatggggatcttttcccttactattatgccacactgtgaactgaatttcacacgtgccgtcttaggggcgagcggctctccttttggcaaaacatgggtaacaacatggaacccttcatcctttctattcacgcttctctcgcccttccttttctttgccttagctgaccgttcgcttttctttgagccggttgtgttagctagtacctcgtcaatttgcgacggaacttttttcttcggttgccgttttgatcgccgtggcgccgtttcctacaagaaggtatacatgacagtttcgaattagctcgggctaatagttatcacggtgaacagtttacatattacgtttacttaccccttctttagggggaatgtagtctttgtcgccttcttcaccgtcgccctttttccttctcttcgggcttgggcttggacaaggatcgcttggcgacgagtactcatcgtcttcgtgagctacgtcgctgccggaactatcttctggtgggaccgttggttccggagcaaccacaacagcaagggactgctcttgctcccctaaacccttctcttcagtccctttagtactatcagccatagtttcaaacctctaacataaaagaaaaagttatcctccacattttaaattactcaaattagtacaaacaactttaaattgcgaaattaattaccacttactattatgctagaatagatatgttattaattagtacttatgctattaattagtacttactattatgctaaattaattagtacaaacaaaatgaaattgcgaaatgtaattaattatacttactattatgctaaattaattagtacaaacaaatttaaattgcgaaatattattaattagtacttactattatgctaaattaattagtacaaacaaaatgaaattgcgaaatgtaattaattatacttactattatgctaaattaattagtacaaacaaatttaaattgtgaaatgttattaattagtacttactattatgctaaattaattagtacaaacaaatttaaattgcgaaatgttatatattagtacttattattatgctaaattaataatgctaaattagtacttacaaatttaaatatatcatccacaatttttttaaaaaaatgttaacataccctcctacatgttatttaaaaaatttgacaaattcacatatcctgcaaaattgaacataccctcccaatttcgttcacatatcacccacattcccaaattcacattcacaatcacatataacccctcattcacatatcacccacccctcattcccattcacacccacatgcacacacatatataccccctcacacccacatgcacacacatataaaaaggaacaaccacatgcacacacgttcatggacgacgaacggccgacgacgaacttcggtcgtggacgacgacggaagggccgacgacgaggttcggccgtggacgacgaaccggccgacgaagccgttcggccgagtacgtcttcgcccgtggacgatgaaaggccaatgacgaagccgctcgtggacgactgcgagagagagacagagatggcggcggcggcagtggagaggtcggcgaagcggtggatgggccgagggggcaacggccggcggcggtggacggtggcggtggtggagcgctagcgcgcgagcttgcgcgcgcgcggtggctggtggcggtggcggcggagcagcggcagaggtgcggtcagtgtagctcggtggtggagcggccggcggcgggagcggccgggctgcggtggagctgatcgacggccggcggcgcggtggagcgtgaggccggcgcgagctcgaaggccggcgacgcgcggaggacgacggtcggaaggtgaaggtcgcaggcaggcggtggcggaggacggcggaggcgtgcggcggtggaaaattttggcatcctgacggcgccaaaaattctagggttcccgcctggacttagaaattttggcgccacaggcttgcccttatatagggtaacgatcttcacaggcgggccgcccgcctgcgaagccgatcttcgcaagcgggcggtccgcctgcgaagatcgtttttactatcttcgcaggcggacggtccgcctgcgaagatgtaaaccctgctcggcataataatcttcgcaggcggaccggccgcctgcgaagatatttgcaagactgactctttctatttcaaaattattttaaaatcatttttgtgatttcaaaaatgtctacagtagttgtaataaaaatggtaattgtacatacaaatagataaaccttagtattactacttttcaaatgtaaatattacttaaatgtttcaaacattaatattacttatatgtgcacttaccatttttttaaaactttttaaaataagttttcaaacaatcgtaagtgaacataacaaaatgctactaaatttttaaacctcttttaaaaatcttttaaaaaataaaaaactgtaaatgttaccctacaaatggtaattgcacataaaattagtataaactaatatgcaaaatgttgcatgcaattgttcatcaatttgcgatatgatcacacatcaccttacataccaccattacataactactaacttcttagatgcttacatgcgactcaacaatcattactgtcggtgatatgggcccgggggtatcacgtctagagggaggaggccgccctcaaacccacgtggctccccgcgaggggggatcaagcccggggtggagcggtggctacccccacctagctagagggaggaggccgccctcaaacccacgtggctctccccgaggggggtcgagcccggggtgttgtggcggctaccccctcccagctaggggtcaggccgcccccaaacccacgtggctccccgcgaggggggtcgagcccggggtggcgcggcggctgcccccttcaagctagagggaggaggccgccctcgcttggggtcgagctgccccgaccccctccacgtatcagcccacgtgtacagggttaggtgggcgcgcctaacgcccacctaattgcatttaaagaactctatgcaaccacgccatgccacatttaatgcggcgtgctgcgcatctgaccggtctgtgaccgattgaatgaccgatgggacggcgactgtgtacccccgccctgtcagtgtgtcaggcggcgagcggcgtgctccgtccagtcccatcataatgatgaggggcttcacagcctcttacctcggtcagagctagtccaaccactctgaactgacccgggttcccgttttctggtgtgaacgagaacctgaaagtcatcatccattaaatggcgaatgacaagggcgccctgcatgatttgatgggtcccgcgcagcaaccgacgtgcagatagcttctgggctaaggcacaagacatgtaattaatatagagaatattttcccttctccctaggtagcactcgcagcacatgtggtatccccttagagtataaaatgaggaccatgcctagctaggaggtgggatcggactgaggatccctgagccaaagcttgtctaaccctaacttgcataccagggattcagggactttctaagcacagaagaatcatacacacaagagtaggggattacgcttcattgcggcccgaacctgtataaacctcttttgtctcatcgtcttggaggggcctccgagatcaaaatcatacacagtttcgctcaccaaatcctcgaatctcacccgctgcccctggccgagctctcaaaggggggcctcacagcctcccgctagagagggtcacccctcaacaattaccctttaatattttttcccacaccgtccgtgcgcatgtaaggcttcacgatcttctgagtagatgtctcgacattcttaatcttctatacaaattgactataaagtggcatactatcgtattgattgtaatcttcgacatcttcaaccccatccactcccaatatcttttgtttcccgggtagcactatatctttcttcaaatttgatgggtctttcacgtaaaacacttgtgccacgcgattggcgagtacccaagggtcatccttgtgacccacactcgccaggtcaacaacagtgagaccgaacttatcaacattgaccccgttcgggtattttacccactgacacttaaatatagggaattgcattgtgtgcccatagtcaatttcccatatttcttcaataaacccgaagtataattgtttttccccggcttcatcaattgcctccacacgaacaccgctattttgcgtacaggtcttattatctcgggctcttgtactaaacgagtatccattaatgtcatatccctgccaagaatttactgtagttgatggaccacaagccaaccgcttcatagttatttcatcggtaatttgtccctcaggtaagtctaggtctcgcaaccaatctacgaagagacgcttgtgttctttcattatccactcggtggtgcgacccttattgttagctcgtattagttcgatatgttgatcgatgtacggctcaacgatagcaaactgatgaagcacgctgaagtgagcttcttggaatgatttgtgatcatgggtgacgaatctcttctttcctatcgttcccctgccactcaatctgccctcgtgtcggggcacaggtactccaattgcatatccatctttgagataatcgatacagcactcgacaacctcttcagtactataaccctcaaccattgatccctctggatgtgcacgatttcgaacgtaacccttcaaaactgccatgtaacgctcgtatgaccacatttgatggagatacaatgggccaagtgcaaccatctgcggcactatgtgaacaatgaggtgctccatcatatcaaaaaatgatggagggaaacacatctcaagttggcactgtgtctcatgtgtgaatgtacggagatttcttaactcttcgagactaataaccttctgtgacactgcgttgaaaaagtagcacaaccttgtgatagcaacctttaaatgctccggttttatggcccttattgcaattgcaagaaacacggtgagcaagacatgacagtcgtgtgaattataaccagataccgacaaatctttcattgaaactagtcgactgatgtttgatgagaaacctatgggcactctgacatcacagagtgagttgcaaaatgatttcttctcctcaggtgtcggtgtgaagcaggctggtggaagatatacttttccattcttttctccttcttgagggtgtaactcttccctgattcccatctcgactaggtccatccttgattgcaaaccatctttagtcttcctcggcatgtccaacaatgttccaactatgttgtcaaacacattcttctctagatgcatgacatctatggcaagccgaacctccaaatatttctagtatgggaggtacttaaaaaatatggaatgcttcttgaataggggagggagtttaccatctggcttcgaactatcatcttgcttcttactatccccttgtttcgtattcttctcgggtttcttgcgctttgtcccctttgatggtttcttagtcacttttctaaacttgcaaacaattttctctgtcattgcacacaccttttctcccgatgttggtttgggtgcaggatctgtctcttcagtgccatcgaactccgccttcatcttgcggtacttgtgatttgtgcgtaggaaccgccggtgccgcatgtacacaagcttgttggaacccgggagatacctatagtacgttccattcaagcagatcacacatcctgttttacctttaatttgacctgaaactgaaaacattgctggataatcattaatggtcacaaagatgatggccttcactgtgaagtattcccttaagtactcgtcccacactttcaatccctccttccataaatcagccatatcttccaacaatggttcaagaaatacgtcaatatcaataccaggctgacggggtccctgtatgaggatacagagtagtatgtattttcacttttgacaaagccaggtaggaagattatacatggtgagaagcactagctaagtactatgtgagctgctcatgtctccaaaaggattaactccatcagtactcagggcaaatctaatgttccgtgggtctttagcaaactctctatactgagcatcaaagtttatccactgacgagcatctgccgggtgtcgaatcatcccatccttcttgcgcccttcttcatgccagcgcattagttccgcatctcgcgggtttgagtatatccgttttatgcagtctttgacaggaaggtaccacatcacaagctgcgggatttttctctgtcgtccctcagttgtgtcagacggttctaggccagtattgctattcgatttgtaccggctagcaccgcatgttggacattcatctaaagaagcatactctttcctgtatagtatgcagtgatttacgcacgcatgaatcttttccacaccaagtgaaagggggcatatgagtttctttgcttgatatgtgctggatggtagtgaattaggcctccggagcattttctgcataagttctaacaaactgtcgaaactggtatcagaccatccatatctcgcctttaacctcataagttcaagaactgaccgtagtgttgtgaactcactgtcacagccattcgactcatcatacaaaactccctttgctgccttctgcgaagattgatcttcgcaggcgcacgacgtctgccgcctgcgaagattgatcttcgcaggcgacgcttatatggtccgcctgcaaatatcaatcttcacaggcggaccgccccctccaccctgggtactttttttgccggcggggttttggctccaaattacatgcccgccttcaaaaatcgatcccctatgacgccgaaaatgagttttctagtagtgtaggcggcctaaccgacgtgagacgagagctcacaccgatatacttttgacgagagtctgtttcgggttgattttatggaatatgttgattgcttaacatttatgacttatataaggttttctatacttgagatatattgttatgtgctaatgtaggtcaagaggaacttgtgttcggatgtggattctttggttattcatgtgtaagtgtagcttaaggcctcggaattactaccggtgatgaatcaggactagacttaggagaagttaaggcccacacagtaggagatcatgtgggatacccagagaataatgcacatgaagatgaagtttcagtgtgacacacaagaggaattgtgtgtgtatgtgaagatgagtcaaatttagattagagtttaagtttaagaggattggagtttgaagttgcaaagcgatgggtacatccctagtttgaggggtttcctcttgtgattaggaagttggattcgtgactacggatagccatgcttataggtataaatagatacggaattgagactcaaagtaaggcaacttttagagagaaaagttagagtttcctttgagattttgattttagtttctgagttgagagataggtactttaaatgcactttggaaacacaaattgatgcaataaagtcaatctattttaaatagattttgtcgtgttatgtttttcagtttttaacgtttagacaagtggcttcacgatggtcagcctaacggtaagcgggcggttagaccggtgacttgaaggtggtcaaacggaagcgtctacaagggtagatcagtggcatccgaccggatattattattctgctaatttatagggttttttcagaagctggagatataatttatttctattatctaaaatatacaaagatttgaaagagaaaaaaaaaggggcatacattaggtcctcattggatctcgaagacgaaatgaaactattcatgtgaatgaaaatcatgtaaaatttatccaaaatgaaactatttgggcctgattaacatgtgctgtagaatcgtacaactgtggatgggcccgcatgatctataatgaggtgggtctaattgttgaggaactgtctaggccttgtcttgaacatgtgaattccggcccatacatgcgaatgggccgtggttttggtctatccaaaacaagatcgtcggctccccgccctatccacgagtccacgagccggcgacgcagactgctacttggttggagggagtttttaggagggattgggagtttagagagatgagactattaagtgttttatttgattgggagacatgggaattttggtgggatggggatggagaattgagcaaggaactccctcctttttaatacggggtaggtaattgggagagaattcctcctttactttttctaagcaaatctccgccatccgtttttattaataacctaatctgcaactaaactccctgtcaattttcatcacctctaccaaactagatattgggattaaaaattaaattctcatcttaatctcatcatcaattctcttatgtaaattcccaatccccttctctcgagtttccacacaagccgacggagaaaaatatctctcttctatccaccgcaaggccaacgcagagcgcgactcgccgtccgtcagcggtggtcgcggcggccggctacaagatgatggcgtgcagggccctcgcgctcctcccgctcccggcgccctcccgtctcccccgcccgcgcgccgcctcgctcgcgcggctcgacgccgcccgccgccgcgcctctgcctccttattggtccggtgctgcgccaaccccgccggtcccggaggccaggaggatccgccgcaggacgccgtgctcaaggccatctcccgtgagtaaacctttccttcccgttccccggaacccccttcctcgcctcgccgtgccagtggtagttctgctcttccctcttttttgactagcgattgtttggggactgtcgctggtgatttcagtggccaggtgatgattttttttttttgagattgggattggggttttaggtgtgtctggatttgcagctctgctcgccgccgattgcttacagcaatgtgagtggaaagataacatagggggcaatggtgctgaactcctgataggatggacttccttagatattcttcttgtcccttggtcaaacccctaccagcagactgatttggagtaaattaccgacaaatggtggtaggggaatcttcgatctggttgcctcatcgttattttcattttaaaggagaagttacattcagtgtcaagttggtcactctttggacatacggttattgcgaatttgtaggtctcaatctttggttatatgcatacttaatgggctaatatggtgagaatatactatgttcagttctcttcctattgtttgtttgtgttaagttttccataggttataacatagtggtggtctcttgtggttttaacttttcatttcctaaaatagaggtagcgaactctaaaggacgggttgcacagacaacaaatgttgtcatgggtggtactgtgacagatgatgcaactgatgaatggcttgttctggataagcaggtatcctatcctctctattgggtgtttcattattacttctgtttgttctttctttcacaacaggcaagtgaatgtgcattttaaaaaaaattaatggaagcgcttgtttcatggagtcattttgctccattttcatgtaaatattccatctgaagttggaaaggtaggaatttatgtgtccctctagatttcaacttagattttttgcatcactgttcttacactagattgtatactgggaagctacataaggcaacagcagacaatgtcattaacatctgcagtcactagtcggtaatcatggctaaggcccagttcttttctccaactccaaacttcaactttctcatttttcgttagcaagtttttcaaactattaaatgatacgttttctgcaaaaaaatattctatatagaagttgtttaaaaaaattcaaataaatccatttttcagttttataataattattaatgcttaattaattatgtgctaatgagctttctcgttttgcgtgagctaaaaatttctatccacacaagccgatcgaacgcagcttaaggagtgcgagttggttgtcacagtagcctatggagtatggaacaatgaacactaagtgtacttactttggattttatttcaaccatgacaagggcccttgtttcttttattccctaggtaaatacatatcctacagttagaggatttactgcaattggtactggaggagatgattttgtccaggccatggtggttgcagttgaatcagtactggaagaacaaattccaaaggttggtatttgcactctacagctccaattacagatgttcttagaatgtgcaaccattgatgaaagtgattataatgtatttatgttttttttagaaaatgggataaacccggcctctacatccaactggatgtacacggccaattatgtatttacctggatataaaattgctacttttctctaaatgctagtatgctagtaccaagtaaagatattgtaagcttgcaatgtgaagtgggacatgaagactgacgaggctgaagaatctcattgcaaccagtaggaccatagacaaaacaagaaagctatgaagttgatgaggatagcatctgtggcaatctgcttgcatatataatatagagctgatgagcaacttcagagttgctggttagcatgtttggtttaatgcttgcgtgtttgttagcaaaaggatggcagaaatgcatgtcatattattttccagaacataatttgaaaaaaaaaaggtgacactagcagctttgtggcttgtgcgtttgtttggatatgaacaatacccaagttatttgcttagagcagttcatatgtttggttcttcctgctgttgtgcgattgttctgtcactatcttgattcctgtgtgtttttggcttttcttctgcaggctcagatttcccataaagtgtcgtcgaaggggaaatatgtttctgtaaaaattgggcccattcctgtggtttccagcgagcaggtaaccaattgtcgcattgttccattacgctagcaaagatttataactacagcatttcgggacagttctatctttaccatgtgcggtgatagggttgcacttgtttgtttccaggtccaagcagtgtataatgccatgaagaaggacgaaaggatgaaattcttcttgtaaacattaacagtacagtattattcttgtaactctagcatattgccacacgattggccatctttataagcaaaagccaagaaatttcaccatttcttggccaaacattaaaaagatggattcccactttagttgaatagcttaaatgagaggccacatttcctatttactgggaatttgttctgttacctactgaaatttactggccaggttgggcatgtttggaccatactttcaggaggacctcagtatcacgcagctccatggggttttctgtgaagatagctgcttggcttggtcgatctgacctcgggaacattgatggaaatctgatgcattttggaggtatcgtatctgttccggtcgacctcacactcacaggcagcaatttgctaaactttgaacaggagtgtacgtcatcgtccaagggtgaatctaatctccagtgatatccataaaataaaaattctccaattattggaatagtttgtcgagcaaaaagaaggcgtgtatgtatgtgccgaaagttgaaaggaaaagacaccggaatctgcttggcattttatctcattatttggccattggttgggttcaggaatatactgtatccgattggctcgtccatcagttggagcctcagccctaggccagaaattcatttttggtccaaacaaaatgcccctggaattttttttttggtccaaacaaaatgatgtaggacatccaggagttatcttggctatgttaaggccggtttgattgggaatggacggcctgattgacgatggcattgtgctctgattgtgtcagtgacatatttgacatgtagtatcatgcctcaaggctaagtcatgatattttggcaaactggtagtgtaacctaagttatatgtggtccactgaatttgagttcaaggcactattttgagtaaaatttataagctaagagttttaaagggatcgagccaaacctatgctttgagggcttataaaagaccttaaaaggaccaatctttataaaaagacctacagtaccgtttattaaagtggcacagaaaggaaactttggcttgtgctaacgtgccagatacctgcaggctagcaacgtttgggcacatggcacttcacagacgatggggtaaaggaatgatctagttaatattccatggtaaaaaaagaagaagaagaagaagaagaagaagaaatgtttagttgcaacttgcgcgcgagccacagttcggcacattgaccgtagggattagggaagttcaatcaaagagtaaatttgacagagttgtacgtatttaaatgaaattatagtaagacttaaaattcaaaacataaatatcatacaactatagattttagcttcaaatttatacaaagcaatacatttagtagcaccaattatatcacaaaattacggaacttctagaccttaggtggtgtttgaatcttatgaagatgaagataaaaattaagtgtttcacgtaaaacgaggtggtaataacgtgtgattaattgagttttagttattacaaacttgaaaaatagattaatctagtattttagaacaactttcatatagaaagtttttgcacgaaacacaccgtttagcagattgaaaaacgtgccacaagtatccaaaatttaattcaactttcgttggaaaaaagaacagagtcttaaagtgttcacaaaatgttttaatgttattgcaattcacgcctcaaattatatatttctcatatcttttattgtatgtgaggcactgactgatatcaatggttgatttatgaaatattttgtaggctgacaacctcgatatatgtgtaattccatattgttctatttgtatgtttgtctaccaaattttatctggtaatactacactataagttgttctcttggtttctgttcgatgctcgctggcatgttactcccatgtcctcatcagcacaagagctacgagtataatataggtccggtttagatcccacgtaaaaattttacacactatcagaacgttaacatcttcctgaagtattaaatatagattaaaaataactaattatacaggttacgactaatttgctagacgaattttttaaacctaattgctccatgatttgacaatgtggtgctacagtaaacatttgctaatgacggattaattaggcttaataaattcatctcaccgttcactgacggattctgtaattattttttattagtgtccgaacaccgtatataatatccgatgtgacacgccaaaactttatacccctatatctaaacacccccatactagcatcgagtggtggaagggtctatgcgagattttgtgtatacacatgagtttttcacggactagtccaacacgcaaggagaaaaaaaaacagaaaatcgagaaaaaggaagaactaggattataattggctatagatatgtgcttgtcattgatagctctggtgtaccttgaatccttgatcaacaaagaaatgccttaacacgaaggtacactgaaagagacacaccgggagtatctggaacaacaaatgttttgatttcaggcagactatacatataaaggaatggaccacgcaccatacgtacacaaatcgtaagggttcccattggatagtaaaaactgaaatgtgtactattctgtcaaaaaaaaccaaactctggctataaatctggacacgcatgtgtacaggttcgtagctaggattggacttttttttgggacggaggggtaggtttcaacatacaaagaacggtgccatcgtttggtggaataagctaaacaacgtatttgcaaacgaaaaaaaaatatgtgaataaaactttttttatacgtgttttagtaatctaaaagtaacgtttactacaatgaaaaaaaaaatctcaatatcaactttaaatttgaggttaaaataattaaattttagtttataagtaggagcacaaatcccttgagttaaaactttaggccatgtttagataatgggatagggaaattttatccaacccttttaatcttaggccttgtttgattcagtttaggattattataatctagcttattaggagtaagctgaaacaaacaaatagattattatagtagattattataatctataagccagattattataactaataagctgctctaaaggagctttttttagattattgagtggctaaagacccactaccctacatatttgagaaaaattacccacctatgccatcaactgaaagctgagagcattatagactttagcctttcaaacccaataatccatgcctccaataatccagacaaacaaacaactcacaacttattttatatcagcttattataatccagcttatagcaatctggtttaataatctaaattataataatcataagctgaaacaaatagggccttagtcaatcattcttcatatcttatttcatctcatccctccactcatatattactatcctagtcccaccccacttaacccattattcaaacataggctcagagataaagagagtacataagcggacacggaaacctaccattttctttttttttttcggggaacctaccattttctttaacccaaaaagatgacatacgagttcactgttccaccgtcagcctccctagttccgtacattttggccgtgtgagacgttctgctaccatggaccgtgctctacggctcatcactcaccagatattagatgggcagccaggttggaacagtagtgagtgccccacacaccccccaccccttccttcccgaaactagccataacaccctcgcccacgtcgtggtcgccgcgtcacggcagagtagggcattcccgtcatttcaaccctattgtaggccccccaccaaagcccggaaaagcacggtaccacctgacaacctcacctccaccgtatctccgccccgcaccacacctagctaccttctttcactgattctgggacccaccggagagtgcggcgctgtaggacccacctggcaggggactaggatcatcccgtttccacccgcggagcggaggggctcgtgagcagtgtgtgtgggagcagcagcagcagcagcagactctgctgcatgtctgcgccaccaacgcctcgtcccgcgcccgtacaacccgcctcggcccgcgtctcgctgacgccgcgggcccacgcgacacaccaatccgccgcggcgataagatcggccgccaccaatccgcggggcgcggtgcgatgcgatgcgccgatgccacgagcgtcgagcgagcccacgacctccggtggaaacgggaaaactggaacggaaacggagccgcgtgagaaacggacggacggacggacggaagttggggggttctcgtgtgcgggcgctgctgataggcggtcggttcgctgctctgcgacgcgcggggccctaggattttgggagaagctgcgccttctcttttttttaaaaaaaaattaactgacggtttcatctcaccacctcctagaaccgtgatattgcgttcaacgtcctcaagaatagggagattgtttcgttttgctccttctttggtgtatttgtgtgatgttgataatagcttagcaggaaaaaacagttggtaatttcaagtattagggcggtttgatgtacgaatatttgacacggcaacaaaaattagtaactaggagaaataattggtaattttgtttagaagcaaagcttgaactgcgcaaacgatggtctaaatatacgcatgtgatgttttgactcgtaaatgatccatggaattaaatcaagcatcatggttgcaaattgtcactccacaatgttcgattaatgaaagagaaaaatgctagtatgtggtagataagtgtgagcatacaccattcgatcggatgttaacgtagtttcaaatgagagcacttccctgaaacaagcgttatgaatataaacatgaaccttcaaagtttggctatattagtaacatgcatgtacctttatcggagaagtgggaaccaaggtccccatcactagctactcagggcatccctatcaccaatccccaagcacagcctatggagcacggttgcacggccccccatgggttatgctcgaggcacatcagtccctcagcgcgattgctcggggcatatatgtctttgggcacaaccacctgcgggctatacccaggcagattcccaccccccatgggtggtgctcggggtgcatctggcctccaagcacgcccctctttgggcagtgctcggggcacatctcacctgcgcttggcgcctgagtgctagggggcacaaggaacatgtagaacgtgcaagatctacatctttaaggtgttaaagatgcaactcgcggcatcagaaaatctcctccaagcgacgtctatcacgaacaccattatcgacatctcgagaggctcgtccaaaccaacaaaaaaaaaatatacgatcaacaatgggagcgatcgtgggtgcgtgggtatgttgggtgccctgggcgcacggctgccccaagcatactggccgctcccaagtacaaggcgcaggcgacttgggggctcgggatgaggcccaaacatgccctttgccccccaccccccccccccccccggttctcctcaaaaagttccatcccattatatgagcatcagtgggtccaaaagattggcattgaccaacaccatacacaaacagtagggtagagcaattcggtgtatagctcacccacataccaagagtcatggcgttgcataaagctctttgcatgcccacatcaaccgacaactttaaagggggcggtgtgtggcacgccctcatcattcgttgtccgagcctaccttagtactctacaaagcagtcacatctggacgccttgcttggagggacatcgacttttacattagtagagacatgagacacaaccattaactctgagagtatagtgtctgcgaccaagataggtggttggtaaacatgagcaaagcacttgacttctagctagtaagataacttgtacaacaacatggagttacaagtatgactaataatgacaacgttgcactcaaccaatttcaacgatacaaccacaatcttctttaagaaaaagctcgatgcaatgaaagtatggctcaagcctatggatggttatggttatgataaaaaaacatgtttaagttgtagcacatcaattgatttacaattattgacatcgtactaacattgaacccaagaaagtaacttgaaaaaacctaatcgataattctttttaatagcaaagtgaagttgaatttgattagcacgataacttgtaaatgttgtcattgtaaacatctccaatagatactataaattcaacttaaaaaagagcaaaatgcataggcatgtaccatttgatcagtgtgagcctagtttcactagaaacatttgctgcaaccaagcccatagaacataaatgtgaacctcaaacatttggctacacgtagtaatagtagcattcaactataaccgttcgcccgttctaaccttattaggcggaaaagtgaacacaaacaaaacacctacctgacaactcatacattgaaataccaatacatttacaactagcaataacaacaaaaacaaaaaagcaatgcgacatagtataatattcacatagatacaaccagaattattgctaaaacaatttagcataacagcaataccacttagggtgtgtttagttcaagcaaaaattaaaagtttggttgaaattggaacgatatgacggaaaaattgaaagtttgtgtgtgtaggaaagttttgatgtgatagaaaagttaaaaatttgaaaaaaaaaattgaaactaaactcggccttaagcctttgtatcacataaaaaccttggctacaaatataacgaggctgtgagtagaaaaccaggaaaagcagaggaggagagtgaagaaaaacggttcaaaaagtgcagttgccaaaagcaaaagagtgaggactgtgcctctctctattaagctcttctcccaaagcccaccaccttctccatcccctccgcttcttctccccctcaaaccacccgagacctggacgacggttggagcagcgagcagggggggctaaaaccctagccatgaagtcgctgtgccccaaaccaggcaagggcggcaagatccacccctccccactcggcggcggcgacggcgaccccgtccgcgcggcgctgcgcctcctccccgccgccatcctcgcgctcgccaccgccctccgccccgaggaccagcaggtgctcgcgtacctggtcacccgctgcctccagggtgccggcgctgcgcaccacccggagcgggagcacccgcccgcacgcggcggaggcggggggcgccgccgccgcggcgcgcacccgccggccatcgggtgcggctgcttcgactgctacaccagcttctggtcgcgctgggactgctccccgagccgcgagctcatccacgacgccatcgaggcgttcgaggaccacctcgccgccgccgagtcgtccgcccctccgtcctcctcctcctccaagcgccgcgacaagggcaagcgcaggccacctccgccgccgtcgccgatgtcccccaaggtcaccccggcgcagcagcagccgccgcagccggccgagaaggtccatgacgcctcccctcccccatcctccctattccctccccttcctccgccaccccctcccgctcctgaggcgacgaccaccttcgagagcgacgacgacaacgacgagaaggtccccgaagacccatccgccgccgcggcggagaatgcgtcggagggggaggaggaggaggaggaggaggaggagcggaagcgcgggtgggcggacgtgatggggatgcttaacctgcggctttgggggatttggagtccggccgtggagagcgccacctagagccacaccaccccaccaccttagcactagaagcaaaaccagcagcagcagcagcagaaggtagcaagaaatcttcagagttcatcaggggagttcagagttcttttggggtccttttctctcagggaaagagggaaaaaattggagtatgaatggagcaagtgacaattgctgctactcctaagcttcctttcttggccaaaagcaagtgatcataagtggttgtaatcttagtacttagctctagtataggaatggttggttggtgatcagtgattgtgatgatggtgtcctggggaagggtacatgggagggaggaacaagtaccagctataagaacatcttctgccttttggtgctgttgattataaggtctcttggtttttctgacatgggaattgtgcaaaagtctctgcctttgctgttcattcatggcctctcttcttcctttttttctaggttttatctaaatctaactcggagtagtccttggcttgctaatgatatgcactagcagctagccacctttcctagccatcttggtgcattctccagaagaacattgcataattgcatcttggtcctgcgtctggaacagtagggggttgatcttgctagcattgttctgtcagtttgtgggtctctgtgtgcctgtgttgtgtgacctttgatcagggccaagctggagttttttatgatcgttatcaagaatgctagtagtatagtaagagaaattttagattttgcaagtgacaagccatcgtctgatttggcaacttgtccagatcgattgtaggcattgctgttcatataggttgaccgagagattagctcagtataatctgtaattctgcaaagcaactattagtagtggactcgcaggttaatcatgggcgttagtgtgttatctctgggaaagttgtgttggcgaatcagggttcagttgttgcagctgactaagcttgtagtataatttcctagccaatgtctctgttatggttaagtacttttggccttgtcctcttgccaaaactggacatcctctgttttctttgaacgaacacatcctctctgttttctcagtgtactactagtggagtactacgtttaagcagtgatgctaacacaacttgattgagtacctgatgcctgagttgcatttgttagatgatgtgtttcgcttagtgaccaattaattgtaagtggagtggatggcaatggcattgccgcattggtatcgttatcagaggcaggttatggagagtagactgggtagaatggcatttgtagggacaagtgttttgttttccttgtcatggataattttgtttgggcctcgtatttggagcactattccacatgtagcctgtactagaccacaggcgctgtaacagtagtaacagttcacctgtattcaccaggtaacagtaacagctcacccttcagttgtttctagggtaaaaggaaagtatttttgctcacagcgaaacggggaaaaattacggtcatactttggtcagtgcccaagtgcagtacgtgaaatccaacctttttttttttgcaaacaaaaaagacgatgaagcgaagctatgaacaagacattgcgtggctactgttaataaaccctttgacatcgaccgaacaaacaagggatcgttccaggaattcagaaatgagctacccccggtggcccggccccaatgttcatctcggagccctcctacagtcctactcacgtgctctttccgataccaaacttctaaatttagcttctgtagttgggtctggagtcgagttgtcagccagttccacaactctaattcattttgtgagagagcttcacccaactccactcccagttttgatggagctgaaactgtttggctgagctccagctggagggatggagctggagcagaagctgtgccaaacagaccctaagatcttatttatggctactctcagacaaactacaagttcatttgtacctacaaataaagttcatgagttcttaaaaaagataaactacaagtatagatgtgaaaagatgaatatgttattcattaaggttataaaaaaatatgcttctcggttagaattttgatatacccaagagctttaattaagaatgtttgccctgggcaattagaggtcacgatgttggtctctaaccaagagaaataaaacgaccatattagaaggctactgtagtagactccacatctattaaaagggtctgtttagttcacacacacaaattttacaccctttcacatcgaacgtttgaacaccatatgaagtattaaatatatgctaaaaaataactaattgcatagattgcgactaatttgcgagacgaatcttgtaagcttaattgctctatgattttacaatatggtgctacagtaaatatttgctaatgatggattaattaagtttaaaaaattcgcctcgctgtttactgatggattttataattagtttttttattagtgcccaaacatccaatacgacaccctatataatactcaatttgacacattaaaaacttacaccactgaatctaaacacccataaaagatagtataaatgtttgagtcttctttatatatatatatatatatatatatataaatacaggtgttttagactgcgggaattatagcgtactaacgtggtggctcgtcaatatcccggctgaagcttgaagggcagcatactgcatacatgcacctcgttccccgagtggcgttccacctgtcgcccgctcgctacacctgcactgcactgcaccttcaatctcctcgctcttcgttccttctgccgccgtcgggtccggagaaatcaagcgtgacatggtgctggctaaggccctatttagataccacccaaaattttacaccctattatatcaaacgtttgaacacttgcacaaagtattaaatatagtctaaaaaataattacatagattacaactaatttacgagacgaatcttttaagtctaattgctccatgatttgacaatgtggtagtacagtaaacatgtgctaatgatagattaattaagcttaataaattcgtctcgcggtttactgatggattctgtagttagtttttttattagtgtccgaacatcccatgtgacaccctatataatatctaatgtgacacgtcaaaactttatagccctcaatctaaacaccccctaagataagcgtttaggttgcgttctttcttcttttgttaacttccaccatctcgtttttcacgcttccgaactattaaatggtatgttttataaaaattttctatataaaagttgttaaaaaaatcatattaatgtttttctaaaaatagtttttactaagagcatgtacaatagcagataataaaccaaatataaacacatttcgaggagataaaataagagagagatgagcagtaggctacagatctgtagctagttacagcacaatctccaagatacatgtatgtatgataggtgagaccaaatattaattgtgtagtatatgtttatgggtaactatggtatgaattggctataaaattgattatagatgatttggaaccgatagctggctatactattaaacttgctctaatactctctccatcccaaaattagaagataaatttataaatagtaataatgaagcttttttttatttttcagaagtatatagagatatatagcatatattgtagttactagccaagaagccgtgtatcgcaatggaaaacaaatttagtccaagtagtatttttatgattttacttattgaataagtagttgatttcgaaatttagggatagccagtcatgaaacggaagataagtcattggaggggtgatgtagtagtataaattgtggggctaagtggaagtgagtgatatgaggtgttgtagaacgggcgctataaactttaagtagtactatagatgaggtaccttggaggtatataacttccaactagcagatgtacttgttagtcagaattcaagaatatttataatgatgagttttcaacctagttcaatctccaatactctctccatttttttataacaccgttgatttttttatatatatttgatcattcgtccatttaattttttttttcaaatgcataagatataaatcatgattaaagtatatttagtaataaaataactaacaataaaataaattataattatataatttttttaaataagacagatggtcaaacgtgtgtctaaaagttaatcatgttatctattaaaaaatgaagatagtattagttttgataattccgtttatggatagatatatctcaaaaaggtacctctatcaattggaataaaaccttggaacagaaatagaagaaatagcaccagaccgatacttgctctacctccaccaggtgcaggatgaatttggccgggtttagttctaaaatttttcttcaaacttttaattttttcatcacatcaaaacttttttatacacgtaactttcaacttttccgttacatcattttaattttaatcaaacttttaatttcgacgtgaactaaatacaccttttgtgcaggtaagctacgccaggctcctttgctcctgtcctcctatgctccttatttttgctggtgcttggggaaagggtttgaccgtgctgaccgccccgtcggacagagaagagaagagaatctctgtgtgtgttctctcttcaggtgtaccagtagtacgggaggcgaaagcctgggtgcctcgcctgctgacccggctccgacaacaccgacacgagacggccacaggacacaggcagctttgaatgtttcttttcgtaccgcttacctgcactgccgtccgttcgttcgttggttcgtccgcgcagggcagtgtccggccatacgagccactgaactaggggagttttggatgggcagcgtctcagacctatggttttaagttctagctaggttcgaataccacgctgaaggtttagagtgatctcacagagtgacagagaagcctatataggcaactgtgatttggggtgacttttggagagagaagggggctctatgtggttcaggagagaactaagacttacatgcgccgaggttgtcgctacactccaccgcagccactgttagattaatgggctaggcccaattaaatcctaataaattctattggcccacattaagtgctataggtaataatatgtcacgcccagaaattcccgaatagaattccaagcagaatgtgcattaaaacccctgtccaggaccggccggggtacacaaacgacgaagtcgacatacagatccacgtcttataaacatcataaaagtcttacataaatgcaacagaaaattaaaagataactggagctaagccttgacttggactgcagcgggaacaccactccacaggcatcctcgacggcacggacgaagactactcctcggaaaagccaccatctgacgcatattcaaactctggggtttggggaaaaatagagcaagactgagtacaaccaccgtactcagcaagtcataccggaataggggtatggtgcaggatataaccaaaggaggctaggggttcatttgcacaaagctagcatttataaacagttgaaagcagtaaaacagttgtagtaattaatcaatattaatcatccactgtccaacgctacaccacgttgcgacaggcccaaccatccacctgaactaatcaattccattagactagactagggtgagactaatcacggtgaatttggttgaccgcccgtaaccgcgggcacggctattcgaatagttttactctgatcagaggtgtacaactgtacccacaagacacagccccacgatacgtttccgtgtgccgacatgccaccacgacataccggatagaggccgtgacaggacccttcgcataaccccctctaaccaagcacaccacacctcaggtttcacccccactcctcgcaaggcagcgggcagtcccctctcgtgcctaggtgaatccggaagctgcataggccgtcgcagggcccatccaaactccatcacgcccacccttgcctagatgcgtcagctagaggaaagctacactacaagcccagccgttgcccacgctggcttgtggtaagtacgttaagttcttccagggcatcccgcgaactggtccttaagtgccatgggcgcgaccatcaaaaccatgcacccacaacccaccatttaatatattttaaataaccaacaccggagcggtggcattaaccaacatcattactagaatctgatatctatgcattaatgtgatttccccatcatgtgctagttgaactaagcatggctaagcaatccctaatccaatatctagtcatgttatatcccaggctaacaaaggagcatggtacaaaaatagcatggctgtaacagtaggtaaacatcccatagtaacattataaaacaatgcagtatttaagggaaaacgatagagcatttgcaatataggatcaacatgttcaagtgacaagcatgacttgccttgctctgctgctggaggaacctcggcgactatttcaaagtacaccggagcgtcgggagagccggaatctaagcgacatacaaagcaacaatacaaacaggccataagactactgaaacagagaacaaaaccatttttaatggattctattcatttttcttgatttactgagacttgaataggcttaaacggagctcggatgaattagatatgaattttagaagattcactggatttttactataaacagaaaaatccttaattgatttattgcgcaataattaaaatcccgaggaagagagagagcggcgccgacatgcgggacccacatggtagtgactcgggtgggggtccgcggtggaccgggtccacggaccggggaaggagcggcgcaccacgtggcgctgacgtggtgccgacgtggcgcacacatggcggccacgtggcagccatgcgggcagctgaaccgacggccccgatctacccggcggcagggagcgcgcggccggcgcgcacgggcagttcaagccgacccggcggccatggcgcacggcggcgctaccgcggggtggcggcggcaaccgacggcaagcggcggcggcgcgaccccgagcggcaaggggtggcggcgctaggaggggaggggaaggatgacgaggaggtgctcaccgagggttcggccgacacggaggggcgacggcggacgacggcgaggaccgggtgagcggcgattgcgaacgacagaaggtctccggaatcacctagcgaacaagatgagagaggttagagagagagagggagatggaagagggcaaggacgctggccgaaggcggcagccatggcggtgctcaccggcgcacgatgcggagtgggttccggcggtggattccgacggaggaggagtggacgggacggtccgcacgacggtgaacgcgacggcgtcaatggcacggctcggcacggcaactagcggcggccggagcgatggcggcggcagcggagaggagggcgacggcgctagggtggtggagggcacgggagcgggtggttgcaaaacgaaaaagagagaggaggaggcggggacgctttatatagacccgcgggggtcgatcgtggccgggatggccgcgatttcgccggcgaagtgcggagaggtggggaggagagagaggcgggattcgaattttcgaatcccgggcgtctcgagcgcggacgcgggcgggaaagagagggagtgggtgcggggattgcggaggaaggtggtgacgtgggcaacgtggcccgagaggcgcgagagcgagggggacggcggctgcgggatacggcggcgacggccggaggtgggagacgggcccaacaggtgggccccacctgtcggcgacctgaagggaggagggaggcggccggctcagctgggccgtggccttcggccggcccagcggggaggggagagggagagaatgggccggcggcccattcgaaaaagaaaaaggagggaaaagaaaaagaaaaagaaggaaatgaatttcctgggattaaatattgcttgtgctcgattttaattggttaaaattatttctagagctctgaaaattccactaaaaatcttgttagcacatttctacatgtagaactcaagaaaaatttcacatgccaattccgattattatttgcattaatttatttagggtttctctcttgcttttacaccgatattttcttgaggccaattaaaaattcaatttaggcttgggaaaaaaacttcagggtgtgacataatacctccttggaaatctaagtgctgaggtctcaacttaaatacaaagctagtggagagtctctgttgaccggttgagatggtgcgcggacaaccaggcggggcgaggcagacagttgctgctgctgcgctctctcgttttgtaacggacagtaataaacacggagaattgatttcgtatcaatgaacgcgtcggttacagaattaaacgtcgtgaattgattccgtcggttacggaattaaataccgtgaattgattccgtattaacgagcgtgtcggttacaaaattaaacactgcggctgattactccgaacgttactctcgcgctcgcatatatatactccgcagcgaccagaaggatgcgaagaagttcttcccgactcttgcacttcgaattcctcctcctctgttcctgagctgcagaatccttccccggttctgttcacctgcgcacacatgtgtacgggatgagcaggtgcctccggaactctgtccgcttgagaacttgcacgggtaggcgtgcgatcaagtttgggtagcgtttcaagcgcgactgctcctgttcttcgttcttcgacgacaacgttgcatcttcctctacttctgcttcaccatggcttctgctggagagaacggaggagacaacatcaatggaggcaatacgaatacctcaacatcttctgcaccattctctgggtacaagattctaactttatttgattttctccttgttatttacatgttcacaatgttatccataggatttcaatcctatgtgaatgtcaacaatatctatgcttattttaccttaagcatgctcatgtttatgtttagccttatcactagatcgcttctcattgtgtatgtcatgtttattgtcttaatattttggattaaaatatgccgaattatgaccaaatttccaacagccaccgcatcccgctgccgccactgaggtcatcgccgctgccatcttatcctatcgctgccaccggacccctcctctgctgccaaatcccgtcgtaaccgtaacccgccgccgccaccgaggtcgtcgtctgctccccactgaggccggatacactgcctaggatcccgttgcggtggtcggggagggagcctcaatacgtgccgactgcggtgaccgaaggagaggcggcggtgcctcgatctcatcaatggagatgggagagagctcgagatcaagtgccaccacacggagtttgccgctgccgatcttgtcgccctctgcgggaggagcccgtcgcggctgcggggaggaaagagaggccaggagggagcccgtcatggcggcagggagggacgcgcgttggcggccgaaggagaggaggcgtcggccgtggaggaagccgtacgtccagatccagtatgacgatgacgactggggagggagctacttcgattcgtgccgactgtgccaactgaagaaggagaggaggtggaggcctgggaggaagttgcctcgatccgctgcctggaatccggtcgcggctgtcgggagcccttcgcctaggatctcattggccgacggcgatccggtttgcaggaagagagaagggagaggcggcacagccggggaggggagaggaccggcgctggcgttgaaagagattccgtcgccgacggtggttcttggttcggtgggatattccatgggaagagggatgggtgagataggctgacaatggacccaccaaaagtatagggtattatgcaattcttttctattattatggagtctaaagtataaaaatctgaaaatagtaaaattaataagggctaacatgtaaaatcctagggcccgaaagaaaaacccactttatggtagcctatagggttgtgtgatttttgttttcataacctatgtgacatctcgagacaactggtaatagtggtctctattatacatgtcataacgtaccattaacgtgtggatatataacggtgagtcctacgtgtaagtgacccacataatggtgagccccctgcctcgatcgggttatgcgcgttgggtcgcgtcctcaaccggttccggcagcttgcaggcgtcgagtatttcccctgccctgaacgtatactcgtatactcctacactttactccagctcgtctcgtatgggtgggcagttaggcactctattgaaggtggatgtgacatgtgctgtacgtgttggacgacgcgtctctctcgatgagatgctatcgcgtggtccacgcacggggccctgcggacggtcggacaatgcaccagcacaaaaccaaaaccagcggtatagcagcggactagctagcgcgcggcactgcagccggatgactgctccagttaggctccatttagttcccctaaaattttttcccaaaaacatcacatcgaatctttggacacatatatgaaacattaaatatagataaatgaaaaaactaattgtacagttaggaagaaaatcgcgagaagaatcttttgagtctaattagtccatgattagccataagtgctacagttacccacatgtgctaatgatgggttaattaggctcaaaagattcgtctcgcggtttctaggcgagttatgaaattagttttttcatccgtgtttaaaaaacccttccgacatccggtcaaacatccaagttatgaaacattgacggaagataagttaaaaatcattttgattagctctttctattctttatctaagacaacgacactcatttagccgcatcatgttctttgctacagaatgtttgtacctacttagatatgacctctgaaacaatactaatattgcaaatttagatgagtacatttaatatattacaactttaactataaattatctaacgggtttatatctaacggaccgtaactttacttaaatacaaaatatttgtaattatcagttagtacaaaattatctataaattaatcagcgcgcggtctcgctcccccagagcgcgacagcgctggcccactgcgcttctcgctctcgtgcacgcctaaagcgataccacgaccggtctcgtgctcccaaagcgcgacgccacgggcccaccaggctttctctctctcacgcatgccacgtcaccggtctcgcgcgcgcaaagcgcgatgccgcgtgcccacgtctcccccgtcgcgtcataaccggtctcgcgatttcatattacgataccgacatcggtctcacgcaacaaaagtgcgagagcgctggctccgcccgaggtagtcgcattgatttctccacgtggcgctctcgcgcgtgggaaaagcgataccgctgcggtctcgcgtctcgtttgcgtttgcgcgagagcgtcagctcaatttcggtatcgctctttcggataacgatttcgccacgctatcgcactttctagaagcgaagagcgataccgatggtttatttccgcaaatcgttcgctatccggcatatttttgcacaatcaatcgaaaaacagtttaatttcaaaatattttcgtcctgctgcttggttgaacctgctctctgttggccgcgctattaatttgggctaacctttctactccctctgtcctaaaaaaagacaaaacctaggtttttgtgtccaacgttttactatctgtcttatatgaattttttttataattagtattttcattgctgttagatgataaaacatgattaatactctatgcgtgacttgtctatttaatttttttcatatttttttcaaataagacagacagtcaaacgttggatacggaacccaaggtttgtctttttttggatggttccaaaaaagacaaaccatagatttccgtgtccaacgttaaactatccgttatatatgaaattttttataattagtattttcattgttgttagataataaaacatgattaatatattatgcgtgacttgtctttttaattctttttataaattttttaaataagatggatggttaaacgttggacacggaaacccagtttttttttttttgtttttgatggtgtgagtacacagcacaacggaataagccatgtatgcgtctctcgctcggctttaatgctgtccaaacttcatcttctactccgtcgttttgtttcgtaaatatgcactcctaatacgcgatcgatcgtgatcccacagcccgagccatcgtcgacgtccacaccccgaacattccggcacgtacgcccagtcagcatgcgctccgccgaggcccatcgtatggctttttcccttactagaaaataaaaaataaatttatagataaaacttttatatatgtgtcctcgataatttaaaagtcaatgctgaaaaaaaactaagttaaaaatatctcaaaatcaatctcaaaattaaatttaaaaatttaaatttggtttattctttgactgtttagaccatctgacgggagctctagtattttttggttagctcacatgcgatactctaataccatatatggtagtatgattagaacagaattagcgtttataaattagcatctcatgcagttagattggaatttcttcttggaaatattttacatgacaaaaatcatcgttcacgaaactagaaaaaatttactcggtaatatttgtatatgaataaacaatttccatttctaatacataattaaaaactatatacatataaattcttcatatagaaactttttatatataaacttttcgtataaaaactttatacatatagactattcgtatagaaactttatacaaataaacttacagacaaacatgttgacatataaactttttcatacacatttttatatagaactttatgttgatgaatgtaaaacaaaagaatataaatattaagtataatattgggcctaaaatcagccaagccattactctacactagtaaaaatgcatttttacaaacggttagatccaatttttgcgtgcggttgagttacctgtatgtccgaaagtgtctgcgaaaatcactaatttttcatgcgggtggagcaacagcacacgaaaatcagttttttgcatgtgggtgtttatgtcgtccgcacacaaaaataaaaatccgaaaaaaataaaaatccctaaaaattaatacactagctcccatttgcaccccgaagttgtcgagccagctgccgagcacatgaggaagcccgagttagccgccagccagtgcatgagagagagaggaactcaggatgaggatgaaataatgaggagaggaggtgagagagaatcgagagagggtaataagtgaaaaattttgaagtgttgatagggaaaagaaggggtaaattagactttaggctgattccttaagagacccgtatgctctttaagaggtccgcttataaaaataggtttatttttgtatgcggtcatttaagaggtttgtctacgagaatcgatttttgcatacgggcctcttaagaatccgtatgtagtgcatgttgatttttgcaaacgcgaccagttaccgtctacaatcaaaagagggtgtcatccagaaaaatcatttctacagtagtgttagctaggagcgcccatgcccatgtccggggaaaagctgcttaaaaacaaacaagcagtgtcattagcgctgattaaagagattctcccgattaggaaagcagcatacttataatccaaaattaggaaagagatcgtgcattaggaacttcattcctgttctactgaacagtgtgttgctttttaaaaatataagtacaagaaacttgtttaattttaaaaattatattaatcttattttcaagttttttatatttaatacttaattagtcatgctctaatgagtcaccatttttttttgtcattgaggtgtctcatttgagtctcaaagaacaattaaaaaaatttcattttcactccccaaaactatttcatgaaaactcaaagcgcttaacgcctgaacaatttttcagctcattttacacggttcaccttactctctaatggtatttgtcttttttcccctctttgtataagccgtattttgcattcaaatttggtaggatcatatgttggaagcactaagactcgtactgatttaacatcgaggttttaaatttcaagcaaatgatcgtgggaattttatttttttaaaaaaaaacggtgaggttttagatttcatagatttaaggctctcacgcttacagtctgatattttagaaagggaaatttacggtccaaaagtagaatatatactaaaagctcttgtgccttcttgcaactactgccggtcctttgttcacaaaaccatgtcctcagcgtctaaatcctaagcaatactctaaaagttcttttcaacttgcgaattatggattatcacatacagccttccgaagctcctgaacaatatgactttaattacaaaagaacactactaaactatcttctcttagtaaaatcttttgaaatcaacccttcaactttctaatagttaatacacacgaaaaattatcatgattttgatttcatctatcgtctatctataaagaactgggctatgagatgggaagcacgtatttacctcatttatatgctaataaatcaccatgacttttgaaccgtgatttcctgattgataaaatagttactccatctggtcagaaatatttagtatttaaaataagatttggttaaattttgagatgttaacgtcaattttatattaaaacaagtttttatgatattatgatatattttcaaggcaaatccacttaaactgttatatttatttttaaattaagcatttgataagtcattgatagtcaatattttcaaagtttaaccaattcttttctttaacgtaaagtagttatgaacggagggagtatacgctattggaattagattacatttgaatacaagaagggttttaaaactatttttgaaattttataaaactgctcggaagaggattttggttcacattcgcatttgtaaaacattgcggataaccatacatgaacatattgttggtacgatcgcaacatctaaacgtcttgcagtgatatgtagaatcgccaacaaccctaatctagcaaaagctagaccaagatgagttttgatagattaaactggctagcggagctgatttagatagaacagtggacaagtactcgtcttgtaggcaaaacggaggtttacgggacaaacctataaaggatttcgcactctcgcaacaaaggcagacgatttacggcgcaaatcgacaaagatggacgaattaaagtagagctaactgaaaagtagaaagcaatattgaaaaaagcgattcgattgattgattgcagtgtgatacattgtttgaaccagccttgtccccttaaatagaggttggtcttaccctctataggcccctcctccacgtctaactcggggtagaaaccaaaaagaatccgaaacatagcctcccgagtaaggaatcccgagacctgacgaaaacggagtctgactcggactctaccggtcaaaccggccacatgccgccgatctgaacggccctctgacggcggtctgaccggcccatacatggtggtcagaccggtcctcctggaggaaaccggcagagttcccaaatcttgacaatttttcctatttcaatcttagatgtcaaattttggtgtaaacacatatacatcgataaaatttttaagaaatttaattatgacaaaaacatagattgtaattatgacaaaaacacagattgtatatcacataattgttgaataaataaactatatactacatatataacgtttggatcaactaattagttattatctattcatcctaactcttaaatattgatcaccagagcttaatcttgcagctcatgttcttgaccctgatctccccctcggtgctgagcctgtcgagcaccaggtcgcaccggatggtcggcgtcagcttccccgtcgtgatcggcccaaccttcacccgcaccggcacctcgccgcggaacacgagcggcagctcgccgccgccgccgacaacctgctgcatggcctcagccacggcgcccgcgccctccagcgtcgcgtcgcccatcgcgacgtgcaccaccccggcgtcgccgtggccctggtagaacgccggcagcgcgccctccgacagccggtggccgccgtagaacacggcgaggctggacccttcctcgtacgagatgtcgatggcgcggttggggttctcgaaccgcaccgcggcgtcgaagctggcccgcgccgtcagctgcgggtcgccgtagccatactcgccgccgtggccgtcgtagtccatgtcgaaggcctgcaccgtgagcgactcgatcgcgtaccggggcagcctcgggtccagcgccaggtacagcgccccggcggcggcggcgacggcggccaccaggacgagcgcggcgcaggcgagccggcagcagcagccgcgcttcttcttcttcttcctctgctgctgctgccgcttcggtaatttggtttcgtgatccgccggcggcggcggcggcggcggcgtgtgtccggcctcgaggtcgatctcgtcgtcttggaacgtcacgtggtcgtggaacgccatggcttgctagctagtaactcggcgcgacacgccgcgacgtacgtgcattgcatgcatgtctcgatcggtgcttagatgtatgtaggaagtggttaagtgcgcacgcgcgctatgatcgaagccgaatcgggaagcagggtgtgtagtgtgtagtacgctttggtttcttatctcaatcagagacaactcatgagactcacaaaaccatgagagttgattttgtatcgcagacacgttcggttcggcacttccaaaccaactgatatatgattgttataattgctgtcgtgcgaggcaggcaggcatcctcgagtgatccattaatatttgaatcggctgactgaattatggatttcattaggatagtaacagttatcatgttctaggataatattgcttctgcgattgtactgggatggttttcatgaatctgcaatatgagttgtttcatacttgcacctaactgataaaaaaaagttaaggtatgagcactggatcatcgtgcatgctcatgcacagattttagccaggcatcctttatttcctattccctccgtttttaaatatttgataccattaatttttaaagtacatatttgactattcgtattatttaaaaatttatgaaatatgtaaaactatatgtataaataaaagtatatttaataatgaatcaaatgataggaaaaaaattgataattacttaaatttttttaataaaacgaacggccaaacatgtttaaaaaagtgaacacctaaacgccgtcaaagatttgaaaacagagggagtactaggtttaaggtgtgttacccaataccaagcaaaacaagctagccaagcggccggctcggacaccaaatcgtaaagtttaggaaagtagctgcatgcttgttaaaacaacaagaggataaagagcctaaatgaaccagcaggattgtgaaaggggaggctcaagctattttccaagccgcacgttaccgacacatccatgacatccagacacaatcccacaatatactgtacatgttttctcaatggcacaaggtatgtttcccagccggaaaataccggtagtgagaagcgaaagcaatgcattcagacatggtccttaacgcctgtccccaagttgacaacaacaatgaacgaaaaattcacaacgtaacacatccacccaagttacaagttagattcaatacaaaacatctaggtactttgggctgctttattttctcgttcatttggcggagaaggtgacaaaaaaaaagagctcttacagaggaattgaaaacgatttcttcaacttctccacctccaaataagcagtggagtacggaaggaactccgaaaaatggctttgcatcaaatcgttgattgccaccgcgagctttgggatttccatgatctcttcattggttagcttccgaacaaacctagctggattaccagcccagagctcaccagttggaatcctccttccagggggcaggacagagccagcttcaaggattgagttggtttcaaccaatgaaccttccatgaggatggaatgctgaccgatgatgcactcaggttcaatagtgcatgagcgcaacagacagtatgcacccactgtcacataccggtcaacaagggtgtcagctggtagtcctgcacataatacataacttaggaatgagattaactgaaaccttggcttatggaagtacctagcacaaatattacaggttacatacataaaagggcatgtacacagaagtgaagtcccaattgttccatggatactagcaacaagtttactgccaaaggcatttagtctttgacatattgccagaccaaattagcacaaaggaaaaaagaggcactaatatgctatccatttttccttaaggcaaaaaaaaaaaaggtaagatactatccaccagattggaaattccatggtcaaattgatagtgggtaagttctaacatgagatttgacctctcacgacccaaaattggagtcaaagattacaaataagcacatgtgcttagagttgatcctcatgcagtttgatttaagtggcatcaaaatatcaaatgcaaacttaccccataagaaccaatgattcagaatccaagctcaatacacaaaaatattgtcatcctatagcagggatattcaactatggttgcgaagaagccaatcaaaaccggactcaaggaagattagctagcaattatctatttagtattgcagccagttggtcctttgagcatggtgcagaatataccacacccgaccttttgaaaagtttcactagagccgtatatgaacagtcatgccctacagtgctaaaaacaaaaggtggacacaaaaaaggatgcatcagtatgtgctggaatcctggaacggtattagaagaaatgattagtaatgtttgtatgatccaatcaagggtcatcaagccagtttatagttgtagtcaatcatatttcaatgaacataaagcattaatcagctatccatttactaatgatatttttaatcatcatcaaatatgcgcataaacacaatagttggcaaatacgaacagacatgaacatgcccatgtaagtatgtaaccactgaacactacttatgtgcatatggttaagagcattactgttaagtgttattcccagcaaaaaaaaaaagaggaagaaataagtattatttatgccgtctaacatcagcatcctcagttccataaactgcctcatgaacaacgagtcaaaagcctcgagtccacgaccaattaattatgaaatttacatatctaataacatggtaccaattaactatagtgagccagctggggttattggcaatttggcatcctgagttttggtcggccttggatttttttgaatgtgtctttcactttgtgccagataaacaaaaagacaacacatattggcacaaataggaaaacgttgcctataactcatcccagttcaagttcaatagcactagagtgcattgcttttatactccaaaacagaacactatagacagtccaggccaagattttcaggttgctagtggggataataattggtaacattaacttaatactttaagaagacagataccatgtgtcctcgtgcttacagataaacaagtatgcaaaagcaaagttctcaaacatatcaccacatcacaggctgacatgcccctatttataccagtgaagacaagggtaaaacattctcaaacataaaaataataaatcaaaactcaaaaaattcaatgctttagttctttacaatacagttctgtcaattaccttgtacaacctcacaatctaagaaatttctttattatgtcagctagaaacgctgaacatcatgcagaatcaaaatttcaggatccatgaactaactataaatagcattacaagttagtaacaggagaattcactgttccagccacccaacagcaactatgaacacagttagacacaatcagacaataaagcacactgctctccagttccccacacttagcaactttgaatttggactgcgcttacaaattaaccaaatgttgaacgcatggagggctgttcccccacacccccaccaaccttgcacttgcagttatggtaaaaaaccaaacatacaggtacactcaaattacacaattatacatgtccctaaatagataccgctaaccaagtcatcattgacaaggccatgacaccactctaaggttaatcattcatctgaagtgcaggaataattaaggttctcagaaacaatgccagaatgccagagttcaaagaacaccatgaacacagaagtacagggtgtttctcaacccatgaatgctatgtactagattgcaaaggcatctacaatgttgcagctagctgcacccttgtgatctactcctatatatcaaatcaccattcttatcatgtccagcagaaaagcatcgcacacgaatttggtcaactctaaaggacgcgccgagaagatatcatcaaacgattaggtacgccggatttctcaatccaagcgagaacatgtaaacgcatcgcaactaatactagatcattcaagaacacctcggaagcattcagacaatcacctggtggtcagatctgggcactagacgagattccagaagaggtggggggatgagggatgggagggttggggatggtgagagacctgtgggcgccgaccaggcggcgtggaggacgcatcgctcctggacgttggcgcagaagccgagggtgatcttgttgaggtcgccgcgcagcacggcgccgctccacacggaggcgccgtcgtagacggtgacctgcccggccagcacggcctcgggggcgacgtaggcgtcgacggccaccttgggcatccactgcccgagcggcaccagctggcgctgcccgcggtagtcccaccgcacccgatccgcgcccgccgcggcggccgcggcggcggaggggggcggcggtgggggcgacgccgcggcgggggaaggggccgatgcggtggcggagaggaggcggcggagggagggcgccgcggcccggtgggagaggcgcgagagcgaggcggcggccatggcggtggtcggggaggtgtgcgggggttgggggtagtgggcgcacggtgtgatgggttcgtgctgccccgagaagaagaagaaagaagacgagtgtctgggctgggctttgggtacaaatgggcctcgaagtgaattacacttcagtcctggacttcagggtctgaaagatggaaaactccaattttactcgctcgtatcactgaactgaaaaccagctataacgactcctttaacttataaccggtgtaacaggagtaactcttaatatgatattaatggtgcttttttttgaactttatggtataatattgacttgtctttgtctcaagtggcagcaacataccgcttacgtgacactaaaaactcaagacccacatatcagtaacaattctaccgtgaaaaataaatcatctactccttccatctcaaaatataagagattttagatggatgagacgtttttgtccacactcatagtactagaatgtgtccaatctatttaaaattccttatattttagggtgaagtgagtataggacttatatgttagtcacatgaaaaataaacaaatatagtgaaacccatatttattagtgggacccacctcacccctctcttatactttgatggtgtgttcggcaccacaacttcccaactcctacccacttgcgtgtatatttcacgaacggctaaatactgtgttttttaaacatatatatgtattacaaagattgttttaaaaatatcatattaatccatttttcaaatttattttagttaatacttaaattaatccatgtggtaataaggctcttcgtttttgcgtgtgtgggaagaaagtttctaaaatccactttcaaatgcagcctgaatcatgaataggttcaatcaataaaatagaaaaatgtctgatcatctgattttgggataatatctaatatagtacaatcaatagattaaatattataaattttaaaagttagtttaaaaacatattataagaaacttacatataaaagcctttacaaatatgcacaaggtagaagcttggaatgtgtgataatttataattcttaagagataaactacaagttttggtaagacatcctgatccgacatttaacttggtaatagaatatgacccaaaaatttaacttggtaacacatcctgatccaacattcacttttacgcccaaatatctaaaaaagagttgtttaaagaaatggaccctatcagactaatgagaaactctgtgggtttacggttttatccatgaaggttcttacacatgcactttcaatagaaatgtaaggttgcatttggcagcagcataaagagaaaaaactcgctcgtctttctcgtgcacgcttactgaattgctaaacaatgtgtttttctaaaagaaatttatagaaaagttgtttttaaaaaatcatattaatattttttaaaattttaaaataattaatactccatccgtcctaaaatataagcatttttttaccctgatacggtcttcgaaatgctactttgaccaacaatatctatataaaagtgagatgttttaaataagaagagttgcatattatgataaatctagtaacatcaattttatatgattgatattttttatttttttgctattaatggttaaagttaaaaatgtttgatttgtcactgtgctaaaaatatttatattttgggacggagggagtacttaattgattgtacgtttagtaagccacctcattttatatatctttttaatttttttcctttcagggatcgatactgttatgtgtcatgagtgtgttaaaaagtatgcaggtttgtggtgactaaaatgcaggtttgtggtgagggtacatgaggacgcgcaaggccgttctaaatttttctcaacaaccaaccttttccgtaaacaccaatggtgagacgagagttgtgggtgtatgaattttaccatcaaggtatttggtttaaatacatgtgtgtatgacttttaccatcaaggtttaaaatacccgtgaatacaagacgtgtagtttcaatatgattttagtaagatgttagtctttctgtttaagcacagggcatctgtaggcgtgtagtgcactatatagttttgtgtgctctgtgcacgtatgcgactccgctgcaatgggataacctagttcttctttaaggattctgcaggctacttgtactgaaagcacacaaaattgataggttttttttccctgatggaaacatttcataagttcggggaagatagtttgttgaccaaatgaccaattctcgatccgctctagtttccgtctctttatgttacaacttgcaaaatcagataaaatctgctcctcaactttaaaagctaaacaggatgaaacctcccgtccctctgaccagagtatttgtgagcatttgtcgcacatagggtgtgtttagttcacgttaaaattgaaagtttgattcaaattggaacgatctttgtgtgtgtaggaaagtttcgatacgatagaaaaattgaaagttcgaagaaaaagttgggaactaaaccagggcataggttggactcgcttggattttgaagcattagaacggaatcatcatctctttcccctagcttgctcttcggcagaaataatacaagagtcacacatactgtttcaaaaatgaagcagtaacacacatacagcattacagagatacttaagacgacagtcccatccatttggtggaggattcgacggtgcaagcgcacatcgcaaaaccacacatgcatcaatcatgctacttaagttcagttggaacagggagaaaagcagattaaacggaaatcaggcaagaacacaaaccaacaggatagttcaaacttgagccgataaaccattgcagagagaatcaaccaatacaacacatagttatacaaccatggcatgtcttccaagcacacagcaacaacggttctactagcatagagtagcaggtagaggcagtaataaattaattaagcacatagagagtagggaaaaggcagataattaattaaagctgcaggaaatcaggaggggcttgggtagactagctagccggcgtagatgtggacgccgatggcgatgaggaagatggtgatgagggcgaagtagatgacggcgtggacgaggacggcgacgccgctggtgtgcatggtgccgaagcccacgatccggccgtgcgccggcagctggaacagcagccccggcgtgagcagcacgaacagcaccgtcgcgatcaccaccggcccccaatccgccatcgcttctcctcaatctgcgctccaaatcctccccccttctctctctctctctagcgctatcgctctcgctgtctgaaggacaagtgatgggtgtactaaaatgaactgcaggtagagcagtgacaagtaacgtggcgtttaagtagcgagaatagcaacagggatactactagtatacagtagaagcgaaccaaacggtcggcgtgacgcgacgagctatgggccgtgtggctggcgcgcggggccagtcgaagcactcttggcccacgcggctcaccaccacgtgagcaggtgcccggcctggaccccacctgtcagcgtgagcgcaacggtgttttcgggcggtgcgggtgccacgtgacgctgccccgctcgtttctctctcgggctacgtattcttattcttcacgctcctttttccctttttttttgttttttttcttttctctccccgcttcggttccggcgattcgctcgccgactcctactccactcccctttccaaatccccacgattcgaggcgtccgcgtcgcattccgcacgtcctttctccgtatgccgtggcttgggggcattgcactgttgcggcttgtctcacgtgggtggccggtgagattgttaggcccgtgcttcgcgtcgtgtcactacagtaccactgagctgaacacacgagcgcgcgcgcgcggcttggctttcgagtcaccggccgcacaccgctcgccacctgaaacgggattcggggctttttctcgatgcgtcacgttccattccattgaaagggatccgccaacggaaagggattcgcgatcgatcgggagagaaaaaagaaaaaaggaacggcgtttcttcagcggggaggatgcttccccatgtttcactacggaaagaataaacctttccttgcataaaggaataagatcacttcgactccctcaactgaccacgaaatctaaatcgtatccctcaaccgcaataccaggaatcttgaccccccccaacttacaaaaccggtgcactttgactcccaaggcagttttgcggatggtttttgcctacgtggcactttgaccgcgtcaaatgtgctgagtcagctaggcagttcggaataaatcccctcactcgtggttggtgttgcccatttctcttgcccatctctcactcatcaacggagagtagtcggcggcggaatccggcgaagagtaggcggcggcggcggcgagggagagtaggagcggtgatggcgagctatcggagtgaaggctcgttgacatcttcctggcgcacatccgcagctcccatcccttaccgcgctggtccatttgagtaccagccggcggtgctgtgcaactgcggagcaaaggcggcgaggtggatctcctggagcagggacaaccccgggcggcggtatttcaaatgctccgatgccagggtgagtttgtattcgatttgtatttggtggttcagatttggattttaggattgatttgtaggtttgagattgcagaatggtggatgcgagttttataagtggtttgaagggcctactagcagctttattcgtgatttgctgaacgatttgcgtgatgctgtgtggtcactgaggatggagaaggagcaacttgaggtggctgctgcggatggcctggcgaaggcagcggaagccaatgcatgcaggcaagagatggttgtattgaggaagacggttgcagagcaagagacaaagatggcagtgctagaggacatgaataggaggctggagaatgagagatgtgtaatcttttctggtttgctagtagtagtttgtggcgtgtttctgttaatgtttggcaaaaaatgagttatctgtgtgtgtgagacagttgtcatcacatttagcaatctgtaatgtgtcaacgagtatacccgtagaccggatatagagggtattgaggtacactggtacaaggatctacgtagtacgacatcgagcaatcaaaagacaagaattatactggttcaggcctcttgataggtaatagccctaatttagttgatatgggattatatagtggaaaacacaggttacaaaggaaaagatggaactcggcggattttgcgagattgtagtcgagttgattcgactagctctcgtcgacttggctcctcgcaggctccggcttcgtaggctgtgtgggttgtgttggctctgagattcgatgctctgtgccctccccgggggtcccttttataccgcgggtttggtactctccgagtaggactcgaacatgtcaaacccggcacgatacgttggcgacctagttcttgtacgagaaggactcttctcgtctattgattttgtgaaaggtttccttagatcataaaggaaatatccgcgtacgcgtgggtataccatgtcaatacgtaacgtatatcgaagggtagagggtatgcctgacccgtaaccctgacagtagcccccgacttctgctcaaaatgaactcgtgtgaccattcgcgacttcaggtgtcgagaacactatcattccagatgcgagaaccgtggagatgacgtgtagtcgagcatgccgtttgaagcccaacggtcacgagtgaattttgaactgaagtcccaaaattgccgctcataacggacctagaaatttccggcggggatttctcttagttccttggaattcgcaccgtcggtggtgcgtctatttaaaggggttttgggtgcgcattttgaagtctgccagcttcgtcaaacgcgcaccgcctgtagctttcctcgccttctccgctaccaaaaaagagccctagcctcaccaacttaagtccgttttccggcgattttccagcagcgatggatcttggcaagtcagcttccaccagcgcgaccttgaagaagctccgggaggatggcgcccttcctggccgcgaaaaggcagagagggaagcaggaggtactaatcctcagcccatcttaggtcgcatggttgcgatcgaagattatgttgtctgtgggtttctccctccaccctctgaatttcttttgctggttttgaatttctatgggctttctcttctgcacttgaaccccaattccattgctttccttagtgtctttgtgcatctttgcgaggcctacattggggtagagccctttctcgatctgttccgcttctattatgagttgcgctggatggaatccaatagggtgtctggctgtgtcgggttccgacttcgtgatggtatgaagtcgcgttatgtccccttccagtgtccctcttctcgcagcaaatggcggaacagatggttttatcttaaaatcaaggattcacatccggtcctcgttgttctcgaggaacaaccggacaagattccggcctggaccgccaagccccccttgaccccctctcccaatcgtttatcgacatcatcgatgatctccgagaacggggtttatcgggatatgaagtcgttgcagacttcgtcggtaggcgaatccagccgctccaggctcgggcccatccagcatataactattccgggccagacgacgcgacccgggtttctcctcggggtatctttctcgcattcattctgacatgcttgtactcgcgttcctctttgacttaccaaaaattggttccttcttgacaggtctgagcagcgaagtcatggagcgacgcatggtcaggtgatgattagcggcccgaccacggcgcgcaacatccccgcgcccctttgtgaaaggggagcggcggagcgcgatgaagcaatcaatgtgagtttatttgaatagcttcccgccttctccgttcgaaatcaacttatgatccgatttagtgtaggcccttcctttgactgatgtcttcggaccgctcgcggatcatcaggtggcgacttctctgaaggagaaggtcgtcgaggaggcgtccgatgctgccaccactagtggtggcaaagttccgaccaagccgaggaaattctcgtctgtgctcggacatcgccgcaaggcgaagactcccttggtaattttcaccttgtcattaggctatgtagtgaggaaggtttgttctcactttatgtcggctgttttgtaggcttccgacgcgtctcctccgcctgcacgacgtcaacgcattgtgacgatccgcgagaagtaagtaaagaaacttttagactctcgtgtcttccgtttgagtggagttttgatccgtggaagctgatagggaggcgcggtcgaaggttggtcaggccaagtccgggggaacctctagcgcgtcccccgtcatggcgtctacagatgtcgtgcccgtggtcgggagtcgggaggcgacgccgagcggccccgtcagcgatcccgctgggggtcgtggtccgccagaggccatccttacctgggaggagctccaagccgagatggggcgccttctcgaagccggtgctcgcgacattggccgcgaggtctcggaggtgagggtggagacggcggcggccaacgcgcgtgccgagcgcttggtgcgggaactggccgaagctcgcgaggacctcacgaagatgagggagctggtggccggcaacgagcgccagcgcaaagggctcgaggaccgcatgtcggaactcggggataacctctccgagatccgtggttcactgcgggtcacttacaccggtctccaccagcttgccgaggagtgcgacgtcaagtcgacgatcccggcgaaccccgacgagttcttgttgacctcttctcttgcggagctggcgacggcgatgggggagattccctccaagcacgcggccaggatcgcggaggagacgtccaacggtatctataccggggcttgtcacgtccttgcatgcgtgaagttgtcgcgtcctgaactcgatctgcgcgagatcttggattagggagcggcaagcgacatgcacaaggaggtgatggaagaagtcggtgacctgggggagtctgtcctccccctttttgaagagtaggactccttgtattttttatgacttgtaaaccttaaactctggttgccttcgtgcgtatgattaccatccttgtccaaagttgtaacgccccgattttcgttcgggattaaaaattatttaataatgcattttctagaaattaaataaaagtttaagcaatttaatcaagtgaaataatgggagaattaaaattttcccttaaaaatctttggccgaggatattttgtaatattctttgtgccctaaatattctctgaaattttcccgtgaattttcggagctcaataaataattttaatagcaaaaagatcatttaatcaattatttaaaaagaaaacaaaataaacttccccttcctccctttcgggctcggcccaaaatccttcccctcccgcggcccggcttgcctccgcttttttgcgcaagtctgcttttcctccctcccggcctcccctctcactcaggccgacaggtgggacccgtggaccccacctgtcacccccaacctccagcccgggcctgcaactgccatggccgccgagccgcccacgtcgccgcccctccccgcgcgtctcccgattccagcgcgcgtgtgggcgcggtccaccccacgtcatccccttcctccaccattccccccacttctcccctccaaaaccggcgccaaactgcccccactcgcccacgtcgccggaacccaccccgccggccgttgccgcccaaatccgcctcgccccggctctctctcaccttcccgagcctataaaagggatcctcgtgctcccctcctccgtttccccctcctccccgagcccgtcgcaccttcccccgctttccccacgcgctccccggcgaactccagccgcgccgcgccaccgctcccgttcaccccgcactgcggcgtcgccctccccggcaccgcagccgccgtgcgcaccccgtccaccgctccatttcccctccccacattcgaaacgccgccgccacgttcaccatctctctccaccaccattgccgcctccagccgcgccgcatcgcctctctggtccacctcgcgctgcgccgtcgccttccctagcaccgcagccatcgtgcgcagcgcggcatccactccatctccctcttccacccccgaagtactgcttccaccgtgcatcccgagccacctccaccgtcgccttagccgccgccgcgtcgctctgtcttcacctctcgcctcgcagcgccgtgtagcacctcggtcaccgttgttcatcgccggaaacccaccggaacgtggtatctctcggtcgccggtgagccccaccattcctctcctctccggcgtggtattctggccgctccggtcgcctatttccctccctaaccgctccaatattttccccaggttttgccggccctcagccgcggctccgccgtggtcgggcgtcgtcggaacaccgttcccgtcgcctcccgtgccgaccaccgccatcctttccgccgccggtcgcctccccgtggtcgtctcgccgtcgccgccctcggtgagcactcccctccccttccttctttctccccttggccggccgcctcccatgcttgcgcgcgtcgtgccgccgccggtggccgcccggcctgtgtgccgccgtcgcttcggtcccggccgccgccgccgctagccttgtgtgcgcgctggccatgccgcgccgcccggccgatctggaccgtcgggtgcgcgcccgcgtggccgatcgccgccgtggactcggtccacggtgggccgtgccactgacgtgtggggcccgctccctttgtggacgtggtccgcgcctcaccccttgctgacgccagcagccccctttttcctttgtaaaaatatttaataattgcgcaataattcggtaataattctagaaattcatttaaatggctcaaaacttctaaaattcatatctaattcattcgaactccgaattgagccattcaacttgcaaaattcatctaaaattgagctctacatgtttgtttactttttatatactatttccttggtttttattagagtttttcctcgttttgcgtgccagcgtgtagaatccgtcgtttcagaagtccgcagtcgcgaggaaaagagttcggaagattgttttgaagaagcaaggcaagtcacacattccccttgagcatattgagcctattttataaatgttttaccgtttgcaaataaatatgcatgttttgctaattaaatgggatccgggtatcacctatctgcttgcttgtgccatgtttacttgatatctgtcctttgtcaacattgggtaataaatcgactagctcatgttacttatgtgacctagctagaactatatgcttagccctgcttaaataacactagctcagttgatgggataattgcagtattagacctttttagtatcagaatgagctatgtgctcgagacatctggccatgcttcatggtcgtaattatccaactaaaatgcgactgaatggtgggctgtgggtgcatggttttgctagtcgcacccatggcaattaaggaccggttcgcgggaaatcctggaagaatttatcgtgcttaccacaagccagcgtggggaacggctgggcttgtagtgtagctttcctctagctgacgcatctaggcaagggtgggcgtgatggagtttggatgggccctgcgacggcctatgcggcttccggattcacctaggcacgagaggggactgcccgctgccttgcgaggagtgggggtgaaacctaaggtgtggtgtgcttggttagagggggttatgcgaagggtcctatcatggcctctttccggtatgtcgtggtggcatgtcggggcacggaagcgtgtcgtggggctgtttcttgtgggtacagttgtacacctctgatcagagtaaaactattcgaatagccgtgcccgcggttatgggcggtcgaccagattcaccgtgattagtcccaccttaataaatcgactcaatgcactgtagttcaggtgggttggttgggtctattcaacgtggtgtagcgttgatcagtgaagatttaatgttactttaattactcaatagttttacggtttgctcaataaaatgttttacaaccgcctttatgcaaatagccacaaaccgtccttgtgttccccttgcacgtctacatcgttggtgtggcttgctgagtacggtggttatactcagccttgctattattcccccttttcagaagtgtagtgcttctgagctaaagacggagttagaggaccaaggcttagaccccagttgagttttgcctgtggagtggagctgaagccccgctaggatcgcctttttccgctgctgctgctttcgtttcggtgcgaggactaagtgcctcttctgtaagtgttttacgctttatttatgtttggaactgtatattacttgtcgttttgtgtaccctggctagtcctggacagggatttaatacacaaaatagtctggaaatttgggttaaatttctgggcgtgacaaaagttgatctcggaagtttttcttgtcgattgtagagatgctgatgacgaggatgtccagcagcgtgggcagcccgagtcactggcgatagttccggtactcgagtttgaaccacacgtctcacatgacgtcgaggaccaaactcttgatgcggaggtcgagatggcgacaaccacctcaagtgagtagcctttttacctctgtgttgggttaggggtttctagcttgtcttagtggccgttaagttttagcagatctcgaggatgcccttgcaacccaagatcgtcgtatccaatactggaagacgaaatttgaagtggcggaactcgagagaacaatgctagccgtgaagaaagagcaagccgtggaaacgctccaaggccgcgaggtgtggtttacatcatacttgaagaattgttgcacctcaatggccagggtatgcagggagcttcgagtagtccgcggcgatcctgaggaatcggcggccgggtatatctcatagttcaacggggcttgtgctcagctcgatggcatcggcaagcgtatcgacgaggccttgaagctagagtgtcgtcgggcgagccgatatgccggaggacatgtgctggcttgcttgcgagatcaccgcccgcgcctggatctcgaattcctccgcgaaggttttgctcgttctcggaggactccggcggagatagaccaccttgcgaggtcgatgtcaccgttggccgagaagattttccaatcaatggactggcattggctgtcttggtaatgtttgtatcctgcgaccaaatatcttaggcgaagatgtgatgtagtgaaatatttatgtacaaactgtaaggaatattttgtgaataaagaaatctgtctttaacaaatgtttcttactctggatgtcgtgtgtaagagtgtgttctcagttaacgacttaagttagccgtttgagtcgtacactctccctagcccctagccttgtcgtcggaggaaattttctcagagcacaaggcttctggactgttgacctgtcttggttgaataagctctgatcctagcccccagccgtgaagttggaaagctcggtttccgattacacggcttggttaatacgcacggcgagaactcttacacgaccagatcttacatggtcttttgtctctgaaggatctgagaaggccttatcggctctgggcgtccccagccgaaggtcccttaggttcctcggaggccttgtcgagacggcgtaaagggacataaggataggtttcaacgctaggtgtagtcggaataggggatcgtccggtgaaaacactttggtcgtgatatgagaccaagaaatagtctttattgatactgtaaggatgtttacaggtacagtggtattgactcatacatagaatttacgtagttggtcaatgttccatgaaattgctagttcgcaaccgtcgccgtctgcgattttgtatgcgcctgggcgcaagacttgtgtgatcgtgtagggtccttcccattttggtgagagtttgtttcgccctgcttgggtttgaactcgtcggaggacatagtcgccgatcgaaagtatgcgtgctcggatgcgcttcttgtgataacggcggagggcttgttgatagctagctgctcgaacggcaactcggtcacaatgctcctcgagaaggtttacatcgatgtctcgctgttcctcctggttctcatcggaatacttctgtactcgtgtactttgatgtcgtagctcgctggggagcatggcttcagagccgtacacgaggaagaagggtgtttctttattggacgttgtcggtgtagtgcgcacggcccatagcactgatgggagttcttcaacccattttttgtcgtgtgacatgagtctgtcgtagacgcgggtttttatcccttgtagtactatgccgttcgccctttcgacttgtccattactttgagggtgagaaaccgaggcgaagcatattttgactcccaagccgatgcagtaattttggaaatcggcgctgatgaattgagagccgttgtcggttatgatacggtgcggtagtccgtatctacaaaatatccctctgatgaacttgatggcgttatcggccttgatttctccagtgggtactgcttcgatccatttggtgaacttgtcgatcgctacaaatagaaatttgtagcctccctgtcctcgtgggaatagcccaagtatgtctagcccccagcacgagaacggccaagtcagagggattgtctgaagcgcttgtgcaggtagctttgtgtgtttgctgtggaattgacaggcttcacatcgctggaccatgtcgcatgcatctttaagggcgattggccagaaaaacccttatcgaaaggctttgccgaccaatgtccgaccggcggcgtgtgacccgcatatgccttcatgtatgtcgaggaggagttgtctgccctcgtcggtagagacgcatttgagaagtatcccgtttggcgcttttttgtataaatcgttgccgaccatacagtagatctttgctttacgggttattttctcggcctctgtatcgtcctcgggcaactcctcgctactgatgaatttgattaatggggtgcgccagtcatccgtggtttcaatgtcagcaacggcgcgttctgcctcggtgacctccgagctgatgtcgggggtgctcgggccaacttcgccgctaacttcttttaccgatggcttcgtcaggacgtcgagaaaggtgccgggttcgagcggctctcgtctggatgcgcgtcgcgctaggtcgtctggctcgacgttgtccttgcgatagacgtgtcggacctcgatcccgtcgaacctcttctcgagcttcctgacttctgcgaggtacttggataactcggggttggagcatttgtagtctttgtgcacctggtttgcgactagctcagagtcccctttgacgattagtcgcttggccccaagtgcggctgcagctcatatcccggcgagtagtccttcgtattctgcagtgttattagttgccctaaagttgaggtggattgcgtgcttgaattgatctccggatggagatgtcaagataaatcctgcccctgcttcttggctgttgagtgcaccatcgaacgccattgtccatgtctcattgtcgccttggttgtctgacttgttatctggcatggtccaatcggccacgaagtcggcgagtacctgagatttaatggctgttcgcggcacaaagtggacatcaaattggcttagctcgactacccatttcgcgatgcggccgacaacgtctttgtttctcacaacttcgccaagggggaaggaggagacaattatgactctgtgggcttgaaagtagtggcgtagcttccttgatgtcatgatgattgcgtagagcagtttttgaatctgtggatatcttgtctttgcgtcatggagagcttcgctgacgtaataaactggtcgctgtactttatctctctcgacgacaatgacagtgctaacggaatatggcgtggcggcaatataaaggaataatttttcattaggttggggagcaacgagtacaggggggtttgataggtagcgcttgagtgcaataaatgcctctttggcttcctgtgtccatacaaagttgtcttgtttcttcaacaaggcgaagaaaggctgtcttcgttctcccatcctagcgacgaatctgcttaatgctgccatgcatccggttagcttctgcacctccttgagtcttgtgggcgacttcatgttctcgattgctttgatcttctcgggatttgcctctattcctctgccagaaacaaggaatccgagtagtttgcccgacggtactccgaacgtgcacttctctggattgagcatgaggcgatatcgtcggaggttgtcgaacgtttcccggaggtcatcaatcaatgagtcgcttgtcttggttttgacaacgatgtcgtcgacgtaagcttcgacattgttgccaagctgattgctaagtgcgccctggaccgtgcgttggaaagtattcccagcggttatcaatccgaaaggcatcttaacgtagcaaaataccccaaacggtgtgatgaacgctgttttctcctcgtcctcttttgccatgctaatttggtggtagccagagtaagtgtcgaggaagcttaatagttcacaaccggctgttgaatccactagctgatctattcgagggagaggaaagtgatccttggggcacgccttgttgaggtctgtgaagtcggcacacattctccattttccgttggccttccgcaccataactgggttagcaagccactctggatggagtacttatctgatgaagccagctttgagaagtttgtcgagctcttctcgtatggcttgttttcgatctggtgcaaatctccgcagtctttgctttactggcttggcatcgggtcgcaccattagtttgtgctcaatcacctccctggggacccccggcatgtcggacggctgccaagcgaacacgtcggcattatcgcggaagaaggtgatgagcgcgagttcctatttctcatctagtgtagccccgattttgacagtcttgtcggggttagcactagagagcggaacgatcttgatggcgctgtccggtttcggcgtcttgtttggcttgctcactttcttgggtggttcagacgtggcgggtggggtgtgcgtttgctcgaccatgtcgaggctccgcttgtcgcactgcaccgccagctttgcgttcccctgaatagtgattgttcccttcggtcccggcatcttgagcacttgatatgcgtagtgggatgcggccatgaacttcgcaagtgcagttctcccgatgatggtgttataagctgtatcgaattcagcgacatcgaaggtgatctgctctgttctgaagttgttggcttggccgaaggtcacaagcaacgtaatcttgcccaaaggtttggacgatgattggggagtaattccatggaagggttgatcggttggtgtcaactcactttgcgaaattcccattgcatccagagtgctggcaaagaggaggttgatcgaactgcctccgtcgatgagaacccgtgctaccttgacgttccgaatagtgggttcgaccacgatcggataccgtcctgggataacagaggtcttggtatggtctgcttccgagaactctatcttctgctcagaccacttcatcctgggtgcagccccctgccacgtcgaacagacttcacgtttcactttcttgtattctcgcttggaggagtacgtcgtggagccgccgaagatgtgtgaaacgtggaggtcggagtctgggtacgcagagtccgattcgtgaggaggtgactcctcgttcctctcgacaacgcgtactcgcttgcctttttcaaacgccatgtgcttctcgagcgactttttgaaaacaaggcaatcctctagagaatgtctgtctgttttgtgtatggggcaccatgatttctttgtgtcgctgccttgtgggtccgggcgcttgggagggttcgcgtattctactgcgaggacttccgcttgagctttccttttcccgtttttgcgatttttcttcttgtttgactcaaatgcgtctgcggctgatttcttctctcccctagtcttcggcttgtcgttctggcgtcttatcgcgtcatccacgtgggcgcaccgttcaacgatctcgaataatcttcgagtagttgtgatgcgtcttgttgccaactcttgggtagtgtagcgatctctgacaccggacttaaaggcgcgaattacagaagcgtcggtaatctcggggatggtgttcctgcactcgttgaagcgccgaacatattccctcaatgattcgcctgagttctgtgttaacgcgtgtaaatcgtcttcgatcacgtggcgcttgtatgttccttggaaattggtgacgaattgttgccacaggtctgaccacgaagaaattgagtaggggggagatgcatcagccacgaacgtacagaacccttcaacgcggttggtaaataattcgccaacgcattgtcatctgcttcggcagcataaagcactgtcgagtagacttgaaggaattcttctgggtcggtgctcccatcatacttttcaatagctccaggtcggcatctctcaggccatcggacatcacgtagggaacgaccgaaagccctacacccagcactgggagcggtgggttgtcggtggtcgcgtgaccttcgtggatgtctgtctgacgatgaagaggacgcggatgatgatgatgacgacgatgggtcgcttggttccggcgtacgattacgaggatgacgacctggatcccgggaatcctgtcgtcgtctctcgctgttgtctcgacgccgatctccttcatcgtcgtcgttgcggcgacggccatgaccagtgttgtctggcccccgccggtcgcgatcgtcgtagtctcggtcctcgtttggacgatttcctcgatcatggcgccgcgaagagacatgacgccgggagcggtttgcgtcaccccgtgtgcgtcgtgcttctcggcgaccattgatttgatctcgaagatcgccagtgccacgaggtggaggggtagcttatcgaggtgattccctccgctccggatcttcaccattggcatcgccgactggtgatcgatcttggtgtgctgcggtagcggcttcttcgaacgcattgctgaggttggtcaccgatgcccgtaatcgttccgtccaacgctcgaggtatttgtttagaacgggatcgtaaggagtttccctcagtatggcttgaacaactctgatgtgctaggctggagtagtcgattgattcgccgcctccgcattggcttgtgctgacgtgccaacgtcatcgatacgcaatacctcctgcgccgcacttgttgtcgatgacccatagtcttcgaggagatgtaaaacagatggttcgtggggatcgagatcgattaccccaacgaatcgatctgaggccggagtcgctccttgttccttgccgttatccctgacggggacgtatcacttaggagacggagttttcatggcgccgaggagaactttgcagctcgagaggtcgtgattctttgtcttgtggataggacaatagacatcccgagttggagaagtacgctgaattccgcgttctttgcaggcacgaatttcagcacggacgttgatgaatacccagcaatcttgaagggtatgtttcttggttttgtggataggacaccaagacctgttaacttcggaagtcatctttgtcggcccgtgatgcatgtcagagggacaaggtttggccgtatcggaatccttcacgagtttggatgtagtcggtaatccatcctccgtttcaacaggtggatttttcgacatggaggcgtcttggttcgtagccactgcgttctcgtttccagtcattggaggaccggttgagatcggcgtcgtggtgtaaaccgggaagacgatttcgccgacttgagtccataccagcattgttgaagtagagagtacttggctgaagctggtgttggcgttgttgtcgacgaagcttgatggcatagtagtagaaccttgagtaccaagatcccctacctggtgcgccactgtcgacgagtgatacccgtagaccggatatagagggtattggggtacactggtacaaggatctacgtagtacgacatcgagcaatcaaaagacaagaattatactggttcaggccctttgataggtaatagccctaagccaattgatatgggattatatagtggaaaacacaggttacaatggaaaagatggaactcggcggattttgcgagattgtagttgagttgattcgactagctctcgtcgacttggctcctcgcaggctccggcttcgtaggctgtgtgggttgtgttggctctgagattcgatgatctgtgccctccccggggggtcccttttacaccgcgggtttggtactctccgagtaggactcgaacatgtcaaacccggcacgatacgttggcgacccagttcttgtacgagaaggactcttctcgtctattgatttcgtgaaaggtttccttagatcataaaggaaatatccgcgtacgcgtgggtataccatgtcaatacgtaacgtatatcgaagggtagagggtatgcctgacccgtaaccctgacataatgtgctatctactgttcaatgaagtatgaagtaatgagatgtgtcaagttgagcaaacggagttgaaatgaatcagtgaaatgaccatttttgactgagttgaatgaatcagtgaaatgaaccagtaatgagatgtgtaaagttgggcaaaatgtgaacacacataagaccagttaacaattcagcattatatggtctgacttgtacctaatattagaggcatttgcagcaaacataatgtcaacacacattagaacctcaggtgcacaaatgactccattaaatcagacaattgaacataggccaattcaggtctggcactgaaacatagttgtagcaaaaggccatatggtatggcattacatgacagcacacacataaacatttaagtctggtgctcaacacacataattaagcctaattgtcagctccattacatcacaggtgataattaagccttcatagtctggcatagcaacatacataggaatctgactcaaagtttgtcagatttccatggtggcataacgaggagtgctccagcacttgattttttggccttcttggatggacctgaagtatcagttttcttggacctcctcagtggctcttcagcagtgacagaaacataagccttcccagatgttatctaaattgatgcacttgaagatccctgtgattgtggcaccatggcttgcaagttgagagttgctgatccaccttgctgtgttgatatcttggcctttgcattcaccctgacaacttgggtggactccataggtacctacaaaaaataggttaataacagatgcaattgtttggcatgaattgcaagaatacaggaggcagaactaaccttctcctttgttgccagtgtccttgacatgctaacagcagttgtgttggcagttgaagtagccttccttttcctaccctggacacaactttggggtgtgtttgatagaaccaaattgtgtcctggattgctaccttgctgaggagctgtgtttgatgtcgctcctgcatgatgtttatcacaagaggtcctgttgtgaccaacttgcttgcacttcctgcacctaatgactgtgcccatctttgacagcttagttggtttaggaggttcacctctctctcttctcctctctgtcttaggcctaccaggcattttgatatatccaggagcattgagaggtaccctttcatcctcaggccagctgctcatgccctcaactggctctaggcaatgctcataggttttcttgaatgcagcaactgagtagcaatcagcaatgtatgcatctaaagagtttgtcctgaagaaaatgcatgatatggcatgggggcaaggcaacccagccaactgccagtatccacatgaacattcttttttgttcaactgaacagtgaatctattctcattatgcttaacttcaaatttgtcagctccatttgatatggcatggcaaaaggctgactcagcaatgtacacattaagttttttcaagattccaggacaaatagcagtgttctacctagcagagtttttaatttgtgcactgatcctacccatcactttcctcctaattatttctagcattgtgataataggaaaaaatcttgcttctaggatccatttgttgaatgattcacacatattgttgtctacagagtcacagtttgagcctaccttaaaccaagccctgctccagtgttgtggatgtgtattgaggatagcctgtgcacctggaggtgtaagctgagccagttttgccctagccaagttgaaaagcatcctgcaaggggccttggcacatttccaaaattttttctggtacttcttatcactgaagtgcctcttccagttaacatatatgtgcctagcacagtttctgtgctcagcctgtggagcctacttctctaaagcattgagaataccctacaataacattaacaggttcacaggttaacaatatgagacagacatgcgatgaatcaatatttaatcattcagttttgagtataccttttgctgatcagatataaacaaccaaccctctccatctccaacttgtaggtctctgctcaacaagtccatgaaccagtcccattcttcgttgttctccttgtttaccacagcccaagcaacatgatacatttgattgtttgcatcccttcttatggcacataacagctcaccattagttgcacccttgaaaaagcatccatccagtcctattactttcctacatccagccttaaaccctttcctaagtgcatctaggcagatgtatatcctcttgattacaggtggatccagtcccacctctctgttaactacaacagtgctccctggattgcttctaagtagctccaactgataattgaacagtttctggtattgtccctttgctgcatccattactttgtgcatcaccaaggcttttgctcttttcagcttggagatagatgcatcagcaaacatctcctcctgcactattgccttcatgtgagacaggttccaaccagggttagccacaataaatttctcatacttctctgcaatccttcttgaggtcaccaacttattgtctcttctaggggggcaagcatgcaaattgtccagggtaactagctgccaactgtgtgaccttgatgtcttggacagtagacagacccaaggacagctaggccagtcacactttgctctaaccctctttggatcactttttataaagttgatcaccttcctctcactcagagcataagcagtaactgctttcctgaacaacttctcgcagctaaatttcgttcctaattcaaatgttggcactcctgccttcttcttgtacctaggatatttgctcttttttgtagtaacctctccatcactgccaagctcatctatggattgttctgaatcactgtcttcatatggtgtctcattaccaccttcatcaccaccagcttgcacatttgggaaacaatgcaacccctcaaaaccaatgtcatccaaatcagctattttccctgcctttatcttcttcttcaactctttgtactgcttgtctatgttggcagcctcctcctcatcatcagatggctcatcatctcctggaaaatattcattgtcagaatcactcccatcatttggctcagttaagattggcaaggttgggtccacatcactatcctctctccaaacaactatcctcttgtcagccacagcctgttcatccccatttcctacatcaatgccaacttcttggccttgctcagccccattggttgcatctatgccaacttcttggacttgttcagctacttcagcaccatcgcctgcaggactatcctcttcagaatcatttttaccctcctcttccatctcaagctcatagtcacggccttcatcatcctctgacacatctactacaataggttcctcagcataaatctcagcaacacctccttcacaaatacaatcagacatatacttgcaatctgtgtcatccaacagtgccctcaagccaacattaagatctttccctgggaacaaccaatgcagcaatgttccatccaaaacctttgtatgatcccgaagatgacctacaatttctgggagagataccttatctcgatctattaatgacattgcctcacggccgccacagtaactcttctgccctcccgacaacatgaactccccattgaaatgaaatctgacaaccagggtgtctaagatgtctatgataacaccaatcagttaccctacatgcaaattgataaaaaaaattatcacccatactattatagtatcataaatccagtttccaaagcacaaaagacgcagtgcacaatataatatgacctaatccactggatctacaacttcccgacataaacaatgctcaaccaccacgaacccccacgaaatccaacaatgtggccgccgtaatataaaacaatggagggagactgcaaacaaacacggtttaaggcaaaaaacttacctacactgctgctccacgcggacccagatccgaccgagacctgcggcgtcgccgaccgacctgcgcagtccgggaccctgcaccgtcgccctgcccttcgagtcgccctcctcgtcgccgtgagacgacggtctagggtttcggtcaacgcaagtgagggatttgggagtgagcccgatgagcgcgcggttattacccgactcgatgtgagtcatcaaatggtggccccactagtcagcgacaccgccctagctgactcagcacatttgacgcggtcaaagtgccacgtaggcaaaaaccacccgcaaaactgccttgggagtcaaagtgcaccggttttgtaagttgggggggtcaagattcctggtattgcggttgagggatacgatttagatttcgtggtcagttgagggagtcaaagtgatcttattccttgcagaaacgagaaagcgtatcctgaacagcgaggagaagggaatttgggccaaaaggtggacatgcatggatcaatcacatttcgtgctcatatcttctcagagaatttgggcctaaagtgacaggaaaaaaaaaaggaaaaaatctaagatattttttgaaaccgaaaatctaagataagaccagcgcagaggctggagattgtgctgctctttatggaattggtggcacgctcgatcaacttaggtgaaccaggtcttacacaggagatagttgttcatagaactcaagttatgaccagtgagttagcgatttccgtgccagataaatcaaacaaaggaatcatagttggtaaacgctggtctcttcctttgaatggcaatctgatgctcaacatcgatggtgcatccatttgttttatctagggaaaagtctattttacaccctcaaaatcttatgcttgtctaatatacaccctcgaacttcaaaaccggatataatataccctcaactgtaaataccggacattttacctccagagctgttttgcagtggtttttgcacatgtggatgacacttcggatgccacatcagtccttcgccaggtcggatgaaatagagtaatatatcctgcgttctctcttatacattcgttctttctctctccttgttcattgttctttgaaacagcgaggaagcaggcacgtcttgcgtctttgaagcaatgaagaaggcgtggggcggcagcggtggctggggttctcaccgccggctcaggtggtggctaagaccggctgaaaggaggcctccctgttgtgtctgacgaaagtactaacaggcttaattagagattaacaggcatggattaacaggcttaattatactgaagaaccaactgaacttttatctttttgcactttgtcagtaattagagattcagaattcagaaatcatctgttgtgtttgcccatcctacactgaattttctactccaatgatgagcagggatttttgttggcaccagcacgatcccttcgccggagaactcatcgtcagtgctcgccaagattgttcagtctaagcagagcaagcatgtgcgcgtgttcagcagcggcacggaccatcggctgttgcgatcgctggtgaaccccggagaggaggacatcctcaccgtcccgaacgagtaactggagcatgtcgtgcggttcctcccggtgactaggatcacgtgcatcatgaccagcgacgacgtcctggttaggtccctcgggaacgcgtatttcctcgtccccacgatggttaacctccaccccatgctcgcggcggcgcgcctggacggccgcgtgacggtgtcgagcgtgtgcggtgccgccaaagcttgttccgtcggccgactcagccgcaaatagcacctgcttgctgtggcttcctccctgctcagccatctccgctggcgcgcagacctcctccgccgatgaccgcagcagcttgtcggagatgctccttccctgcgccgctgccactgcagcttgtgaaaaagttggtcaaaacatcctgtgcgctgatgtggcatccaaagtgtcatccacgtgtgcaaaaaccaccgcagaaacagctctagggggtaaagtatccggtattgacagttgagaggtatattatattcggttttggagtttgggagtgtattttagacaaacataggagttcgagggtgtaaaatggacttttcccgcctgggacttcaacgatgaaatcaaaatagccgagtcagtctcaatatcaatatcatttatcccttgtactaaggcagcttgtagagcagccaaacaagctccagtttcagcacatccatttgtttcagatttgtttggctgctttacaagctgccttagtacaagggataaatgatattgatattgagactgactcggctattttgatttcatcgttgaagtcacaggcttatgatcaagcccctggtggttccatcatgggataagaagtacgaaataccctcctgaactatcacggtcaaccagattacacccttgaaccacaaaacaaggcatttttcacccttaataattgaaaccggacaaataacaccctcggatcaatccgcggtggttttagtcctatgtggcagcctagtcagcattttttatccggggtggttttagtcctatgtggtagcctagtcagcattttttttaaaaaaaatagtggaccctacctgtaaaccctctacctctctctattctctctttccccaatcctctctctcttctctccctgcctcgcctcccttacgccggtgcaggtggcgagcgcgcagcccaccgccgtggtgcgctgccacaccacctgcgcgcgcagcccagctcggtctacctctgtcactcccgaagtttcccctttttcatagttcctaattcaccaataaatcgtctatagaaatgactttggttaaccaggagaaaacctaaattacaatgtatttaataatcagaaatgtcaaggagaatttttttttcgaattctctttgctctaaaatcattaacagtacttaaagtggaatattcatagcatcggagttgatgatgaaatataattgtgcagtaatataatattttggaaatgtcatgtaccatgaatacatgcttaacttttatataagatagatctaatggttataaataatagttcaccggtttaataggcatagaagtatttcagtaatgtagcttcaaaattatggttgttttaatatccaatgttattgcaaagtgagcgcaactcaattagttagatttcttgtggtgcccacctggttcaaatcctagacatgacatcggtgctcgcatttatggctaattattttttcagtggtaggtgacatatccgtcaatagcaagacgctcatggtgacatcgtcaatctcaaaatgtgtccgcttagtcttttggaggtactcaaaggggtagggtgtgcgcgtgctgtgtttgtaaaaaaaatccttggttgtttctgttttagtttaatagataagaaattgcgaggagacaacaaaactcattttctttttttcttaaaaatgttttgattaatgaacaataactagtccgtagaatatatcggatccaaactaatgaattttttaataatatagttaactttattcttcaattttatattttatagtataaataatctaatttatctcctaacttaggcatggaaaataatgtaggtcatcaacgcaagattaatttaagtattagatattacaaagatgaaaatagattctttttaaaaaaagtatagaaagtatttgcaaaacatgcacaatttaatagttaggagaacatgctcaagataaatgagggagagccaatctgataagcactttagaattcaaccttaaatttattacttatgtacttaaaaatgtacaaataaaaaacgtggattgagttattaacggctaaaatcctaaatgtgttttgctagaaaaaaagtgacatatttttaaacaatacttttttatttgtgttcctgacaatatgtcccaagtaatatattaattactcattatttcatcttgaactatcaatgtaggcccattgatgcaaataaattaaatatatctgcactcaacaattgtagtgtgaaatgatacgtttatttgatattttatatcatattatagatctatttttgtgtgtgcatgtttgatgaagtaatatatttttcttatactaccacgttcactaaatatttgacgttgatcatgagaaagaaaaaaaaatccagaggaagtataatagaaaatctagtttaaaatcgttgttttctttcggtagtttcactaaatatttaatgttggccgtcataaaaaaaaaactctctccgagttaataatacttgtcgttttgtacaagggcacggtctccaaaaaacaactttgaccaatatttttcattataatatgtataaaaatgttaacaaatatacgattttattaaaataatttttaagactaatttatacatgtaatcaccatgtttgaaaaataaatattttaaaaataatttataatcaaagattgaaaagtttgacctcacccttgtctaaaacgacaagtattatcaacccggagccccgagggagtagagaggaagtgaaaatccagtttaaaaagcaatgttttttttccagtacctagtacgtatatatgcagtatgttttttttccttttttgctgcatatcatttcttcttttctcgtttgtggttgttaactctgtgtacgtatgccttcttggcttatttcggctaatattttctaggtaagtattacatggtaaattaggagagataaattaggagggatagattacaatttataatggatctaatctaacggtgtaaactaatgggtccatcagcttaaatgaaaactagcatggtggcccgcgcagattgcgcggctagcagcattatattttctctcatacaatagtataaatgttttctcattatattattcaaatatattaaaatgacaacataattttaaattttgcaataactttacaaaactactaatgtgtaatattcatattgtattttatatacgtgttagttattaattatttttaatatcaaattttagttatttgtaaattatatatttcctatatggactctagactcgtcttttaatatttcttttttttaatttcgaattttctgtaaattgtatttctatatagactctatgctcttcttccaatactatttatttttatttctgaatttttattatttctaattttatttctatgtggacactaaactcatctttcaatattctttaatttttaatttcgaatttcagttacttctaaattgtatttctgtattgacttattcccatgttattcttatttcagttactcttattcccatgtttttctaaatttcgaactttagttatttgtaaattgtatttttatacgaactctaaactctacttttaattttattatgttcattctaaattttagttagttttaaattcctatatggactctatactctacttgtaatattccttattttttaatttcgaatttctatttttttcttaattgtatttctatatggactctatactctacttttaatattctttattttttaattccgaatttctttttttcttaattgtatttctatatggactctatactctacttcaaatattccttatttttaatttcgattttcagttattttctaattgtatttctatatcgactctatactctacttctaatattccttatttttaattccgaatttcagttatttcctaattgtattactatatggcctatatactctacttttaatattccttatttttaattctgaatttcagttatttcctaattgtatttctatatggactctagtctcctattctaatattccttattttttaattctgaatttcaactatttctaaattgtatttctatatagactctagtctcctcttctaatattccttattttttaattccgaatttcagctattttaaattgtatttctattctatatggactctgtcttttctttttctccgattaatgtgagaatttctaggccatgagagcgaacgtggaggctcatttttctattcctttaattatataatagattgagggttacatttttttcttttccttagaatttctaagattttctctattttattagagcgcttgagagcgtttttagagcgtcatgtgacggcatgagagcgtttgtaggaagttaaaggccggaatgttttattgcattatcttaaaagagaaaagtcttcatgggtggtttgctaacagtatgtttggtgggaactggcgagagtttaattaggacggccgtagattttatttatttatttttgtcctttttgcacggtatagtcttcaattagtcaacagcgctataacttccttgccccggtttgcacggtaaggtggaattcaaaggaggggataattttcttagcctgccaactatggacttatggagccacagatcgatcattggtgtgactatataatggagaattgacggccggccacctcaaaacaaacaaacctgctggtcccagataagcgctcgatcgcatggccctcgtcgtcgcagtctacgtgctcacagctctcgcggcagccacggcggcggcaccttcgccgtcctcgggcgacgacagcgatgccacggcgctgctcgcgttcaaggcggggctctccgacccgctcggggtgcttcgcctgaactggaccagcggcacgccctcgtgccactgggccggcgtgtcctgcggcaagcgcggccacggtcgcgtcaccgcccttgcgctgcccaacgtgccgctccatggcgggctctccccgagcctcggtaacctgtctttcctctctatcctcaacctcaccaacgctagcctcaccggggaaataccaccggagctcggccggctcagtcgtctccagtacctcaacctcaacagaaatagcttgtcgggtactattcctggtgctatgggcaacctcacgagcctccagcaacttgacctgtaccataaccatctgtcaggtcagatccctcgggagctgcaaaatttgggtaccctaagatacatccgtcttgacaccaactacttaagcgggccaataccggacagcgttttcaacaacacaccattgctgagcgtactcaacctcggcaacaatagcctctcggggaaaataccagacagcatagcatctctgtccggtctcacgctactcgttcttcaagacaacagcttatctggtcctctgccacctggcatcttcaacatgtctgagctccaggtcatcgcccttgcaaagacccaaaatctcactggcactatccctgacaatacaagcttccatctgcccatgctgcaagtattttccctctctaggaacgaattccagggaaggatcccttcgggccttgccgcgtgccggtttcttcgggtactttccttgtcctacaatttgttcgaggatgtcatccccgcatggttgactcgattgccacaacttacccttatttccttgggtggaaatagcattgcagggacaatcccgcctgcattgagcaatctcactcaacttagtcaattggaccttgttgactcccagctaacgggagagatcccggtagaattaggacagttggcacaactgacatggttgaatcttgcagcgaaccaactaactggttctattccaccatctcttgggaacctatccttggtcttacagttggatttggctcaaaaccgtttgaatggcaccataccaataacatttggtaaccttggaatgcttcgttatctcaatgtcgaagcgaacaatcttgaaggagatcttcatttccttgcttcactttccaactgtaggagactcgaatatgtagacatagcgatgaactcttacacaggcaggatccctgacagtgtggggaacttgtcgagcaaattggattcttttgtggcgcatagcaaccaaatcacaggtggcttgccacctaccatggcaaatttaagcaacctcatcgcgatatatctctacgcaaaccaactaactgaaacgatccccacacacatgatgcaaatgaagaatctccaaatgctcaacctccatgataacctcatgacaggatctatcccaacagaagttggcatgctaagcagtttggtagagttgtacttaggtggtaacaaatttgttgcatccatccctggtggaataggcaatctcagcaatctccggagcttatctctaccccgaaacaacctatcttcttccatccctataagcttgtacagcttgacttgtctcataactccataagtggagcattggcaactgatattgggagcatgcaagcaattgtccaaattgatctttcaacgaaccaaatatcaggaagcattcctacctcactaggacaacttgagatgctgacatccttgaatctttctcataacctattgcaagacaaaataccatatacaattggtaagttaactagcttagtgacgttagatttgtctgacaattctcttgtgggaaccattccagagtctttagccaatgtcacttacctcactagcctgaacctttctttcaacaagctagaaggtcagataccggaaagaggtgtcttctcaaacatcactcttgaatccttggtaggaaacagagctctttgtggtttgccacgcctaggattttcagcatgtgcaagcaattctcgttctggcaaactacaaatcctgaaatatgttcttcccagcattgtaacattcattattgttgcttctgttttcttgtatctaatgctcaaaggaaaatttaagacaagaaaagagttacctgccccttcaagtgttatcggtggaattaataaccacatattggtttcctaccatgaaattgttcgtgctactcacaacttcagtgaaggcaatctacttggtatcgggaactttggaaaggttttcaagggccagctaagcaacggtttgattgttgcaataaaagttcttaaagtgcaatcagagagagccaccagaagcttcgatgtcgagtgcgatgcattgcgcatggcgcgacacagaaacttggtgaagatacttagcacctgctccaatctggacttcagagcactggtccttcaatacatgccaaatggtagcttggagatgcttctacattcggaaggtaggtcattcttaggattccgggagaggttaaacataatgctagatgtgtcaatggcattggaatatctacaccatcgtcatgttgatgttgtcttgcattgcgacttgaaaccaagcaatgtgttgctcgatgaggagctcactgctcatctcgcggattttggcatcgcaaaattgttgctaggagatgacacctccgttatctctgctagtatgcccgggacaatcggctacatggctccaggtataaataagcatatctcttcttgcagcagtcatttgattcttcatgaactaatttatatttctcataatatttatcttttatttgttaaagagtacggattgataggaaaagcatcacggatgagcgatgtgttcagctatggtatcttgttacttgaagttttaactgcgaaaaggcctacagatcccatgtttgatggagagctaagcctcaggcaatgggtttttgatgcatttccggctcggcttgttgatgttgttgaccacaagctgctacaagatgagaaaacaaatgggatcggcgacattggaacagccttggacgtctcctcgaacatgttggacagatgcattgtgtcaatagttgagctgggattgctatgctccagtgacttgcctgaaaaaagagtatcaattattgaggtggtcaagaagttgcacaaggtcaagacggattatgaatccaacctaacagttcagggcactcagcaaacttagtgcatgactactctagtccgtaactacaaagtatttcaagaacatcaaggatatatttttcttactgtttccacactttgtatttttcttcttggtttttttgcgcataattaatcatgtagagtatgggctaaatgtaatctttgtgttttatttatatgaccaaggaaacaaaataatcaatttcataaacgagaatagtactgatgataatccagtgctcttgcattgcgctttgtgaaatcatgtgatgatttaatcgtggtgatgaacaattgtcaaaggtaattgttcgtgaaaatgcggtgctcgtggtgattgtcgacgtttgacgtcgtaattctagtatttgcatagtatggggatcgtcggtgctaggatatatgcgagactgaggtaaaagagatggggacgaggatttttatacaggttcgggcccctgagctatcaggtaatagccctacatcctgttggccggagccgatgttgctttttattcaccatactcacaccagtacaatatgtggggtagcttatctaactgttgtcgacatggcggtctgaaggtctgactcgtagtcgacaacagggtagccttcctcctcgagctcacgcccgacggaatcagagacagtgctagatccctacggccggcctctgaaggtaccagatagggtcgatccaggcgtatctctgatgtcgatatccggcagcttgtcttggcgtatttaggcttctatgttgattgtgttgggagttgattgtctcgtggtgggtgtccccctgtcctcctagggggcttgtatttatacccataggtgtccccttgtccaagtagaactagggaaaccaatatggatgcaatccgagtagtacttgtcgtttccatgtagaactctggttgtctttacttatccggaactccctcgatgtcaatttccgtataagacatggcatgtggtggatcctgccgagatttagtcaactactattaggtatgtggtatccataaccctgacagtgatgaagaattgtcaaaggtaagtgtttgtgaaaatgcggtgatgtgtttcggacggtgaacaatgcggtggtcggcactgggttgccggtctgactgagcgggtgccacctgtcagcccggaggtgtccgagcggtctgaccaggctgcccgacggtcaaaccggcagaatctaggtgggagtcgcttccaggttattttcgtggaatttctagattgcttcatgatatggcttctagatagtttctattcgtatgagatactattgtgtgctgatgtgagtcaagttggtgcgaacttatactcggatatagagtttctttgttgttcatgtgcaggcgttgcttgagaccatgggagtatagtcggtgatggatcggaactaggcttgggagaagttaaggtctagacagtcaaagatatcacgcatgatgctcaggctagagaacaatgcttgggacaagttaaggtctagacagtcaaagatatcacgcaggatgctcaggctagagaacaatgcacttggaggtgaaggtttccatatggcatatacgtacatggtgttatggtcatatggaaagatgagtcaaatttggattggagtctaagtttggaaagattggagtttgcaaagtttgtttcttgtacggaaaggtttcataggggattaggactttttgtgtgagttggattcgtggctaggggcaatcatgttatgggtataaatagatgaggatatcgatttttgaaagagaaaagttagggtttgtttcaaggtttcaatcctagttcgagagttgaaagaggagtgctttagatgcacttcgtaaacacatatagatgtaacaaagttaatctactttcaagagagtttcgtcgatacatgtttttctggatcccgacggtttgaccgaagtttatcgagcggtctaaccggcgagacattggcggtctaactggcgatgtggcggcggtcagaccagcggcggcgagcagcagcaggcgaggaagcggcggtccgaccggttggacaacaccagtcagatcggtgtgacatggcgattagaccgactacgtcgagatcttcatcaactttgaaagtaacttttaattcggcagaaagttttgggcttttggctttccataccattcacccccccccacacacacacacccacccacccacccacacacagagacacccccggtaggtttgtttagtcttgttttatcctacatccttcacagtttcgttggccataagctgttttgttacccgaggcacctagaatttagccaaattgacctggactcaaaaacttaatcagatactatttcattgttgtcactaacatatcatccattcttggccctgctaggtacctttatttttgccacatcagaacacatagaaaagcagattagctagctaaagaaagaaccaatgcacgatatatgacagatcactgcaaagcaatttttctgcaaaaggccggaggagaagagaagaaaagctatacacagcacatagagcattacagctacatctcatccttctgacccttttgctttactcaccagatcaccccctcgtgctgaaacattatcttcttcttcagtgatcatctgcacttgtaactacaacaggaacccccctctagcaacggatttatgtattgctacaagtccatataagcgctgcaaagatctatagtaacgcatttagtatgtgttgcctatgctggcgttgctagggtctatacattgttgttcgctagcaatatatacataagcgttgtaaatatccgttgcaagttagcaacagggtgccaacaataccagaagatttatatgcactgctattttcaattgctagtgatcattactcacatgccaattttcaattaataattcattgcaatatgatgtacaactgattccatttaaaaataataattcatatattataagtacaaatctcaatattcattacaaagatctcagagagatacaatttgtcaatacaccacaacataatactgactagtctagccttacaataaaaatattatatatcattttccacaaactttgctttgactagtctagccttacaataaaaatattatatatcattttccacaaactttgcttcagtattcccatgctataggcaaatgtccaaaatatgatatcttccttgtctatttaggcctgaaagatcaacacttacttgtaagtatcaaagagtggaggagataacagaaaccactgatagtagtaaacaaaatgaaagctatttgattaccttttagtttgaagcatcttcaggattatgtattgtatgtcttttgctgaagaaaaatggcacattgaaaatcttagcacttatgtactttatttgggaactaacaagaagcaggaacattagttttatactagattagaaattaacaccttcatcgcttcattaaatagtttttggaataaggtttagttatgaggatagtaggataagttgcatgatttctttctttctggtactgaagataaattttaaccaatagtgccgctagtcttatatgatttttgactgtacatgctcttccgtagcataccaagttatagttgatctaatcaaatgaaattgacgagcttacatttatcactgatgcagtattgtgatacgagtatatatatgacatcacttttaaatgctacaagtctaggacaccaaacgggaaagagtttaagacggctgactgtttacaggttgcaggctttctggaggtatctctgtaattctctatgttgttgtcccctgcaaaaagggttggcagatcaaaacaattaattgattaagttaatacagctatcacatatatcagaattaacatagatgtataaaatctgtgaagtatgtatatatgatattggttcttgaattaatattactagaacgaagtttcagtttcaggaattattaccataggacacaaccccattgtttatgagctccgtgctctcctgcagtcagaacatggctatttatgcagtcagaacatggctatttaggtgtaagtaacataggaaaaattgttgttagagctcagaagaccagggtataggtttacaatatcaatcttataagccttacatgttatttacaatatcaatcttatggaaaaaagaagatgagcaattccttcaatacatctgactgtatgtattaatcagcaagatgaaaatactgcttcattttttacatgcatatgtatctttatttgtggcttgatcatacccatatatctaagattattagaggaagttgtagacttctccgtggaacaaaaattagcaacctaattactattggttgagtgctgcaggaagggtttgtaaatcatatgcgccatggacacaacaaaaaaaagaaacaaatgcagtagatctgcagaggaacagagcagctcagagcaacagagaattcaggagcagagagcaaaccttgatctacacggtatttatccttctcgcacagctgccgtcgttccggccagaatggatggcccccatctgtgcgccgtcactcgcctgtcgctgcaccctgtcaactcctcccatgccgccgtgcctagcgccctacccgtgcatcccattcccacgacaccatgccttgagaccatgccattcccggaggttgacgacggcgattcggcgagtcggcttgcacccaccgcgccgtgagagattggaggggatgggggattcggcgatacctttctggatccgcagcagggagttagggttggccagtttggtaggcttagtgggccgagcaattggggagctcatacggtcgttgcgttgctggattgactcagttcctggtagttgtggacccagcaacgcatgagagatccgttgcaacccatgcgttggtggaggggggttcgtgttgtagaaaggccagctatatcaatcaaaattcagtgagcacatatatatatttacaaaggcacgagcacttgcactgcatgtgttcataaggcatatctagcaagcacatctgtaggagtatatatattatatttggctatggcggtggactggggtccggtggtggtggcggtgatactgttcatcctgctgtcgccggggcttctgttccaggtgccggcgaggacgagggtggtggagttcggcaacatgtgcaccagcggcgtctccgtcctcgtccacgccgtcttcttcttcgtcctcttcaccgtcctcgtcgtcgccattggcatccacgtccgtgccggctagccgtagctccgatcgatctgacgcatgtacgtacgtacgtgcgtttacctcacctgcatgtactctaataagcctgttgccactgaaagtaataggagaactggaggaggtgtcatatgcacatagcacctatatcatattgtaatcgtacgtttaatcgatccgtacagtacatttcatctttattgcaagctactagctttctgcagattaatatatggatatatgcttccttttcattgaggcgcccggacgacaccatttacaggctgtgtgattctacaggagggtctatatatagttgatcaaggttacatgctagagtatctccagttcatatatatatatatatatatacacacactagaaaaatgcccgtgcgatgcaacgggtacacattctttttcagccctagcctagtccgctatctctctgcgctcgacctgcctctcttcggttcagctcacacaaccaattgtcatcctcaaccttcaaaaaatagtctcgtgaccatacgatgctagaacaaataaaaaggtaaaagcggagcatagaaaaggcataaaagtaaaaacaaacaatgtagcatcgccttggctaggtgctcataccacttcgctgagccgctcacattacgtcattactcacctctcatggctcaccagcgccaggtggttggatatggcagctataaaacattatatccactggtccaatggcctgatgactacaaacaaagaagaggatttggagccaaccttgataaatagggaggattgggactatactcggagaagagccaatttctacaagatctaagatattgggagaaaagatttatattaaattatgagaaaatataaatataaatataaaaagagtagagaagaattttatttttaaatcaccaagagaatataacttcacgtcatatcatatgcataagctatgtggtggctaagggcagcagacccatttggctcaggtagagaccggctaaggagcagttacagacttgcagttaggggctgtgggcagatggcccagccggtccagagaggagatcagcagtgacgctgggcagagcgagacgcacaaagctgggcccatatctaagctagcgcgtacgtgtgcgaggaaaatcggatagggatgattttttgcgcaaaggaaaatatcggagacgaacggttaatctcggacaaaacttacggacgaaatttttttacggaagccatacgtattttttaattaggtatatatatatatatatatatatatatatatatatatatatatatatatatatatatatatatatatataaaagatctcatatatgctctaattcgaagacatgcatgatgtttgcacaaattgcgcataaagtttgtaatatctgtctattagactactacagtataacttttatagagcaacaaaaaggaaacatatagctcataaataacattcatattggaacatggatccaaattataatgaggtagattatactaaagaagagtatgcgtagaaaggcaatttagtataacatccaaaaaaaatttacaccttatagaaaatgagtccatgtctaaaatattaccatttattcgaattataaaggtattataagacacctatgcctatatggtgtatacaaaattgaatgcccagctgtttgatttttatacgattttccgagtgcaatctccactgttctaaacttttggtagattatggattatggataaaactgaatttatgacaattactcaagagcacaaatgaaaaaaaaagaatgaatgttaaaaagttaaatattcaaaatgcttttaaaaagttttttaaagaaatgttaatgaagaaagtttttgcaaaattcgtagtacaagctcgagaagcgtgacacgataatccataacatttatgaataaaactaaaacaataatagggtgtgtggagattataggaactagatagccacacagtctataccctactgaggtgggtcagatccatacaatatgtaatacggtaggtgttagagatagcttctcctacaacaggaaagagagaccggtctattgccacgattttagtattgttgccatgatttttttcgtggcaacaaatcattttcctactaatgaccctccctccccccctcctcctttagagattcgtccaaggggcgagagatcgagttaagatcatgtgaacactcaaaacaaatatacatgttcagaccattcggaagcataatacactactcctgtgtctagcactatgtggatgcaagaggtttacagtgttagttctttttagggttttcttctccttcaaatagtcaaaaagtcatttctaattggcatgacccctcctttcatagaaagggggtgtctaaagtgccgctaacatctcgggaaaacccatgctatgtcttatcattgctccctctaacatctttgaattaatgagagaattatggtgtgtggctatttttactatgccccgggctccctagtcagaaggcccgggatagctgagtcttacttctctcgccacgtgatcatgaaacaggtggccgaagccatgtcacgttagagtcgccgccgttatcctcccttggtggtgaagttataaatcttccagcctgactatgacacgttgcctcatccctgtagcctgtagctttgagcaacgcggcattaccagtatttttaggcctcgccacctcttggttgcatacgagcgagctgtaatcttgatctgtaattttgggcctgttcactttgatgccaaaaaaaaccttactaaaatttgatattaccaaaatttggcatagttgccaaaattaggatttcttatatagtttccaaaatttagcagcaaactaaatgtaaccatttttttggcaactttaccaaaatttggtaaggttttttttggcatcaaagtgaacaggccctttctgggcaccgcactgcaattggtatagtgatgttgccctcggattgatcgctagccccaccgctctgcccaagctaccgacggcacctacagcttttaggcccggaggggtaatactaggggagatttccacgaggagcccggggcaataatccccggcgaccccctgtccgaaacctcacctgtacatcatttttaacttgaatgctctaaccatctcaacctcatagtactagttgtatacgtgtgcctcgtgttatttatatttagttatttcacatagattaaaattccgataagtatctctacagagattgaaatgtctcaagaaaatgctattatatatcatgcatattttagaagataaatttaacaaaatatataaaagtgtctgtagattaaaagtattttagacaatatttaaagtgcctctgaaaatatctctacactttagaactccagattttagaggagtgccgctacatgagatttatattgtagtagtgctactgctatcatgtggcagaataaactgtgagcaaagcttcgatatatatgtccatagagattttaaaaggccaatgttatagaaaaactactatgaggaaagtccaaaaacaaatctaaaaataaattttaaaattcaaaattacacagtggtttataagatgaaacacaaacaataggagatttgttctagagtgtgcatcatagttgtgttgcggtctgttggagaatttgatatcccaaaatggcatgatttgttcatgctatcttggttttttttctcaatctttatcgtgtgcatcctagtagatgcgtagagaccagtgtgattttattacttatttatttcgtaatatattactccctccgtttcatttgtaagactttctggtattgcccacatttatatagatgttaatgaatctatgtttcattatcatttctatggatatgggcaatgttagaaagtcttacattatgaaacggaggaagtatcaaacaattacaaaattaatgtcataaatataataaaacaaatataaggatactgcatttatgacacgaaatacatatgttttaagttcagttattagaaaattatctagactaataaaaaagtagagttgtttagtgcaattaacaccaccgattgcaattagtgctggattaaccctgcagttgcaattagcaccggattaacaccacgtctcgctccgaaaaagaaactgcacgccaaaaagaacgaaaaaaataacgcacgtctccgccgcccacctcaccagccacgccgccgcgccggcgtgacttcccacctcgcctcacccgaccatgccgggcctcgcctcacccgaccaccccgcctcctcctttcgccgcctcggcagcgcccctccactgtcgccaaccggggcaccgccacgcgctgcctccgcatggccaagccggccgcgcgagcgccgcctccgccgtcgtcttctgccggtctcccgggaccctgggacaacatgctgctgctcggccggagagccaccgaagccaccgcctggtcctccttcccggccgccgattcccggctccggctccttcgcccctccggcctctgccatcgctgcgccggccgccgtcccgtgccccgcacccctcgccgcgcctcgccctcgtccgctcgtgcgcgcgtgaagaagaaagaagaacgagaagaggagaaatcgtgaagagaagaaaagggacactgtcaggtgggactcatgtttctttaattaatcttgcacagtaatcatcctcttaatcctgccttattatctcattgacatgtgggtccggttacaaaaattcttgattaaatctatatctatactctatactaataatctaataatataaaaagtaccacttcaataccaatcccgcaatcttttagatccactctcgcgtgggtctcacctgtcatccctaagaaagaaaccgcaccgcgcacgaaaaaaaagaatcgctgcaaaagaaagaaaccgcagcacaccacgccatccccatgccgcgccgcccaccggaacgaacccacgccgccgctccacccgcctcacctcaccggcaaatcaatccaccgcatccaccggccaccgccggtgctgccgcaatcccagaagattatgcaggcaccgccacatccatccccgatcccacatcttcgtgaacctcccagtaacatcccccgcacgtttcagggaagtttgccgctcgtggcacactgccgacgacgaccccgccttgatccgctgccacctcgagcggtcacgcgcaaggcagccgccaacatcgtccttgctcgccgtcgtgagcacggaagatatatgggacgacgaagcgctctccaactccgaggttgtcagcttccaccggctaaggcttaccctgcgagcggcggctagaccaggagcgagagcgatggcggcgccgccgctagacatcaccgccgagattgatccgatgctccacaagtctatccctaagggcggccgtatcacccgccatatcatccccacccactgcgacggccttgtcgcctttgccacctatggcagggccatgttcgtgtgcaacccggccacccaggagctcgtcgtgctaccgcccggcagcggcagcggcccatgcccacagtctacagaatcaacggcagcggtcggcttcaacctgtggtggaacaggtacatcgttgtcaggtgcttctaccgcaagtcccacaacgatctgccggtctacgacatcggacacgagatcttcacgctcggcgcaggcgctggcgatggatggcagcgcatgcaagacccgtcgcgtgccatcagtcttggcgggaggagacccgctgcctgcacgcgtgggggttccatctacaggttcatcaacgagtctcagccatgcgcgctgctgtggttcagcctgcgagacgaggcgttcgacgcggtcccatcctctccgggctgcacggcctgcgacaacgacgaccgtctcgcggacctcgccggcgagctgtgctacgtgcatcgcatccgcacgagcgtggccacccacgaagtttggatggcggcggcggttgatgacgatgaccaagagtggtggttgcgataccgagtggacctgtggcacaacccgtggggcgtgcgccgccgctgtggcggcggcggcaacggccaacgctggttccacagcttcggcgccacggcggccggcgacgttggtggccatgttgtacaaggagctgtggtgtcacagggagcagagcaaaccggtggtgaaagacgtgaacgtgtaggggagccggtacagctgtgagtcggctcatcatgaaaataacttacacacgttgacatgtttagtcagtgtttgttgctgcttcagacatatgcagagggaaaatgtcagtgtccggaagaaaaatggcatagagaaaggcatgggggtagggggtttatttttacaaattcaaaataaatttgatcaaacaagaaatctttaagtacatacataacctcaaattgatatggtaagctcgccaacatgtgaaaagataaccaatgaggattgatatgggacttactatcaacatcttcaggaatgatttattccgataagattacattactaacataggtttttttttatgatttatgttaccacatactaaccctcatgattgatttagacgatggatgtatatggtcaatatatgttgacgtgccttgtacgtgcacgctcattatgttttacaatggaggagtatcccgttgtaaaatgtgcataaatatatgacaacgcgaaatatttcgtatgtatttattatttcctttttgaaaaaagaaatggtgctgttgttgagatacggtgccttagtaacgtactacctccatttcaggttataagactttcaagcattgctcacattcatatagatgttaatgaatctagatacacatatatgtctaaattcattaacatatatatgaacgtggacaatgttagaaagtcttataatatgaaacgaaggaagtagtgaatattccgtgttcgagtgtcgctcgacgctggtttcgcatcggggattaccatagtccatagtttctgatgctatgcagggttcacaattccgatgaaaaagtggtcgaattccatggaaaatcgaggttttgacgtggctcgaaagtagaagctgtctgaaatttcaatgggtttcattcaaattcaaatttgaattgataaaaaggaaataaaatcaaataaaatcctataaatagtatgatattcatagaacttactccctctgttactaaatatttgacgccgttgactttttaaatatgtttgaccgttcgtcttattcaaaaaaatttaagtaattattaattcttttcctatcatttgttttattgttaaatatacttatatgtatacatatagtttcacatatttcacaaaagtttttgaataagacgaacggttaaacatgtgctaaaaagttaatggtgtcaaatatttagaaacagagggagtatttggctataaattttccaattggtgtattccgtgtatttcttgaactttacagtaagaaagagaagtgatttaaaaaaagggaaaacattttcctgagacgaattccatgtattaggcccacttagagcaaggtcaataacacagcccgctgttggttccaaaaaaatagccatgccatatatagtaaacagtgtagccaatatctacaatagaaatactataacacagatattttatagatttgtgggacccaccatcttctcctacctcacgttctctttctccctctatcccctcagttcctgacaccgacgagggtctcacggcggcggcggacacaggagatggtggcggctgcgccacggacgtggtagacatcggcggcgggcgacgggggcagcggcggccgggccacttggcggaggaggaagatggcagcggcggtacggtggccgggccacgcggcggaggcggaagacagcggcggccgtgcggcgggtgcccggggcagcggcggccgggccgcgcggctgaggcagaagacggcggcagcggcaaccgggccgcgcggctgaggcggaagacggcggcggccgggccgcgtggtgaaggcgacagacgacgacagctgtgcggcgcgcgacgcccgtcgcccgggccgcgcggctgatgaagacgtgtcacacccagaaatccacaaaccagaatttctaagctgaatgtgcattaaacccctgtccaggaccagccagggtacacaaacgacaattgttgacatatagatccacgtcttacaaaaatataacaaattacaaatacagcggaaaagataaaagcgagctaagcctgaagacttgactcttgcagcgggcgattccattccacaggcaatccttaacggcagcgacgaaaccaacctcttcgagacatctccaactgagaagaacttcaactctggagagggggaaaacagagcaagactgagtattatctactgtactcagcaagtcataccggaagagaaggtatgatgcaagatatatccaagggaggctaaatgttcttttgcataaagccggcatttcaaagcagtagttgaaagcagtaaaatagttgcagtaattaatccatattaaccaatcactgtccaacgttacaccacgttgcaacaggccaaaaccaccacctgaactaaccagttccattagctaactaggggtgaaactaatcacggtgaatctggttgaccgcccataaccgcgggcacggctattcgaatagttttactctgatcagaggtgtacaactgtacccacaagacacagccccacgacacgttcccgtgcgccgacatgctaccacgacatacggaaaagaggccgtgacaggacccttcgcataaccccctctaaccgatcgcaccacaccttagggttcgcccccgtccccagcaggcaacgggcagcccccctttcgtgccgcggtgaatccggaagccgatcaaccggacaccccggctgacccaactccatcacgcccaccctcgcctgggtacgtcggctagagaaaagctacactacaagcccagccgttgcccacactggttgtggtaagtacgataggttcttccagggcatcccgcgaaccggtccttatttgccatgggcacgactagcaaaaccatgcacccacagcccaccatgtagtgtattttaattaaccaacaccattatggtggcactaaaccaaagctatgccaataatcaaagtctatgctttaatgtgatccccctttgtgcactagttgaactaagcagggctaagcatctcctaaaccaacatctagtcattttaatacccaagttatcaatggcgtaagggaaacaacatatagctgagtaatatgacccatcccacgtgatattgtaaaacaatgcaatatttaatagaaatacgggacatttgtaaattgggtacaatatgatcaattgtaatgtgtgacttgccttgctctcgcactgatggaaccacagcaacgtcttcgagaaaccgcgaatcgacgaaacggccgaaatctacgcgacaaacaaagcacacaagcaaaacatgctataagactactgaaacagagaacaaaaccatttttaatgaattctacacatttttcttgatttactgagacttgaatggacttaatcggagctcggatgaattagttatgatttttagaagattctctgtgtttttactataaaagaaaaacccttaatcaatttattgcgcaataattcatcccagggctgacgtcaacacaaggggggcggcgccgacatgcgggccccactggtcagcggcactaagagagggagaagggggcggctggcaggcggggcccaccgggcgacggctcatggggaggaggaaggcggcctggctcggctcggcttcaagccggtcggccggttatggcgagggcgacggcggtaagcgggcaccgacggcggcggccggcgagaagacggcggcggccggcgacgcgagcgacggcgcattgcggcgacacgcacgcgaggagcggcggcgcgcgcgagaggaagagaaggggtgggagttcttacaggggattcggccggagtgggtgaagactacggcggccggcggcggcaagcggcggacggtgggccgcgcgggatggacgagacaggcctcgatctcgcgagtccaatggcggcaatggagcggcgcggcgacggcactagcgacggctagcggcggttggaggcggcggtaggtggcggcgcgtggggagagcggtgcggcggtggcgcacggcaagcaagcggcggccgggatagccctcacgacggcgaagctaacggtggtgacggcttggcgcggcggcagctctagcagcggcggtgcgcggccggagctcgacggccaccggtgacgtgggaggtggagagagagagagtgggggggattcgaattgaatcccgcccattttgggcgctcggagcgggcgggaaggtgagggcgtgggcggcgtcgcggcgacgtgggcgcgggaagtgcgggcggcggagtggggcacggatgcggagtggaggaggtggggcgccggcggttggagcgccggctccaacggctagaggaggaagacgaccgacaggtgggccccatctgtcggcgcccgaaggagagagggagggagggaggacttcgaggaggggaggagaggcggaccggcgcggaaggaatgggccgacggcccaagaaaaggaaaaaggaggaaaaagaaaagagaaaagagaaaaaggattttcccagggatttaatattgcactttgcttattttaattggttaaaattatttccaaggctctgaaaattccactaaaattcatgttagcatattttgacatgtagaatccaagaaaaattccacatgccgattccgattattatttgtatttattaatttaggatttctctcttgcccttaaacaaataatttcttgaaacaatttatcaattggatttttgctagggagaagaacttcagggcgtgacaagacggcggtggtcgggccgtgcggtggaggcgaaagactactacggttgtgtggcaagcgacgggggcagcggcggccagcccgcgcggctgatgcggaagacggcggcggttgggccgtgcggtggaggtggaagacgacgacggctgtgcggcgggcgacgggggcagcggcggccgaggcacgtggctgatgcggaagacgacggtggtcgggccgtgtggtggaggcggaagacgacgacggctgtgcggcgggcgacgggggcagcggcggccgaggggcatggctgatgcggaagacgacggtggtcgggccgtgcggtagaggcggaagacgacggcggctgcgcggcgggcgacgggggcagcggcggccaggccgcgcgctaatgcggaagacggcggcggtcgggccgtgcggtggaggtggaagacgacgacggctgtgcggcggcgggggcagcggcggccgaggcgcgtggctgatgcggaagacgacggtggtcgggccgtgcggtggaggcggaagacgacggcggctatgcggcgggcgacgggggcagcggcggccaggccgcgcgctaatgcggaagacggcggcggtcggaccgtgcggtggaggcggaagacgacggtggctatgcggcgggcgacgggggttgcggcgggcgacgggggtagcagcggccgggccacgcggctgatgcggaagacggcggtggtcgggctgtgcggcggtgaccgtgcggagcgcgccgatgcttctccatgccttgcgtcgagaagaggctacgctaggtgggccccacaatttcctcgagcgtcgcgtgcagatttagtcaccggctcactctctctctccccctctctcctccagatcatcacaaaatcctacgtggtgaaagtgcattaatccctctagtgggttttggtgattaatgacaaatgtggttaagggactaatgagtttattgagctactttcagatgcattagtccaaggtgtggaagatggatgcttggagaccccgtcaaaagtataaaatcaagtggaccggaactcgagaagtgcataggatagtttatttattgcaatcgagtttttaggaaaaaccgtactattaagaggggttccaggtgatgctcagagatatgtcaagtgctcttagtgtgaatctagtgtcaaagtttccctaggagtcatttttgcaaatactccatctattcaaaattgcaagtccggaacttcctatcttccaggttcggaagttccggccttgtgaaaaagattttcctaagtgtagtccggaagttccggtcttccaggtccggaacttcctgtctagtttccagttcaaatttgtgagtaacggttagatgacatcacctagccgttatatatatacagctcgtttccagctcgttccttggccattccactttcacttttcaaacctagagctattgctagcctctctcaagtgtttcttgccttctccactcaatctagagcctaattcttgtgtgaatgagagattgagagggagagaagaagatttggagaggtgtgaagactaggatcttgggtgagcacttggaatatctcgtgggctgtcatctcggtgcttattactcttggagatgatctcctagacggttaggtgtcgcccgcgagaatccgttgcatattgtggatgtcccgggtaagtttgtgaaggatttcctctcctccgaaagggaatgaggtaagttagtgaagttcttgtgctgagattctagaagctttccaagtagagcaacccacacttgtggtggatttctagaagtaggttgagttggatcttggtggtcactcaattctagaaatttgcctaggggtgttttgggttgaaggctgtggatttcctctggggtttttgcacaagtgaggcaaggggttaatcgagacctagctctttggagctcctcaacggagagtaggattgcaagatccgaacttcgggaaaaaattgctcgtctctttcggtgatgcttctgtggatgattctgtgatatatcctctgcttagaatacctgtgcaccatcttgtgaagtttggcttagtcacttgtttcgaaatttgaatttcatctctattctgttacccggaagttcctgtcttaaaacaccggaagttccgggcctgggaggccggaagttccggagttccttaccaggaagttccgagtctgtttgaattttaccgctgcaatttgtttttaagttttcagagacagcctattcacccccccccctctaggcttcatcagcacgttcacgtggaactactgcctcccattattgtacctgcttttagtacttagcctagataatagaataaagaggggatgtggtcctgcacccgatttcgctcggaatttcgccaaagccgaccggtttcacaagtgtatcggtaaacttaaggaatttgtattcaaattttggtttatgaaatttattcgaaatctaccggatttccactggatttcgctaaaaccgtcgtaccgccagagcccagaacataaggtcatctcgaaatcataaaccctgatcctatgcctcacgtatagatatggaataatggatagggtggcatgaatcctgttgataactgtcacgcccagaaattctcgaaccagaatttctaagctgaatgtgcattaaatccctgtccaggaccagccagggtacacaaacgacaattgttgacatacagatccacgtcttacaaaaatggaaaagattacaaatgcagcggaaaagataaaagcgagctaaaccggaaagcttgacttcagcagcgagcgactccactccataggcaatccttgatggcagcgacgaaaccaactttgacaaaacagctccaactaggaagatcttcatctctggtgtggggaaaaagagagcaagactgagtactaccgactgtactcagcaagtcataccggaagaggaggtatgatgcaggatataaccaaaggaggctagaggttcttttgcataaagctagcatttaaaaacagtagttgaaggcagtaaaacagttgtagtaattaatcaatattaaccaaacactgtccaacgctacaccacgttgcaacaggcccaaccaaccacctgaactacaccagttcattaagctaaactaggggtgagactaatcacggtgaatctggttgatcgcccataaccgcgggcacggctattcgaatagttttactctggccagaggtgtacaactgtacccacaagacacgattccacacatgtcgctatgccccgaagtatcaccatgatactgcaaagggggaaatcgtgacaagaccctccacataaccctcccctaaccatccacaccacgctaaggtttcacccccacccctcaaaaggcagtgggcggtcccctcttgcgccgcggtgaatccggcagctggacaaccggacaccccggccgacccaactccatcacgcccaccctcgccaccggtgcctaggaaagggtcgagctatacttcagatcaagcagttacccactcccgcttgtggtaagcacggtaagtctcccagggtttcccgtgaaccggtccttaactgccatgggtgcgaccagcaaaaccatgcacccacagcccaccattcagtgtattttaattaactcacaccattgcggtggcaccaatctaaagctatgccaatagacaaagtctatgtaataatgtgatccccatgtgtgtactagttgaactaagcatggctaagcatttcctaaaccaacatctagtcattttgatacccaagttgtcaatggcataaggtaaacaatatatggctaagtagtaggacccatcccacatgatattgtaaaagaatgcaacatttaatagaaatgcgggatatttgtaaattgggtacaatatgatcaaacgtattgcatgacttgccttgctctcgcactgatgagacctcagcaacgtcttcgagaaaccgcggatcgacgaaacggccgaaatctacgcgacaaacaaagcacacaagcaaaacatgctataagactactgaaacaggaaacaaaagtatttttaatggattctttgcatttttcttgatttactgagacttgaatggacttaaacggagctcggatgaattacttatgaattttagaagataaactgtgtttttactaataaagaaaagtccttaatcaatttattgcgcaataaagcccagggctgacgtcatccaagggggggcggcgccgacaggcgggccccgcttgtcagcggctcaagagaggggagagagaggcgccggcaatcgggccccatgggtcagcggcacaaggtggccggtccactgtggaccgggaccacgcgggtggtccaccgccggtccacgggaccgacggtccggatcggccgggaggccgatcggacggcacggcggcggctaggcacggctcggctcggcttcaaaaccggccggccggccatggcaaccggcggcgacgcgcacggtcgccggcgacggcaattggcggcgtgggaagcgacggaggacggggcgaaaagcggcggcagcggctgaaggcgacggcgcacgcgcgaaggacggcggcgcacacgggagagagggaaaaaaggggagcggaggggagcctcaacggcgagcacggcgaccaaagcggaggatgaaaggcggcggtgacccggcgacgaggaggggcggacgggcggaggcgacacctataggaaaggaggagagggattaggggtggagaggacgaccgcaacgaccaaagtggccggccggagatggatgaaaaaggagagctcaccggcgagcgagggaaacggggtttcgggggtgattggcggcaaccaagcggcggccgaggagcggacggcacccgcgagcgcgacgacggcggcttcacggcgcggcagcggctctagcggcggtggcgcgcggccggagacggcggtaggcggcggcgtaaggggcgagcggcgcggcgacgataggaagcacgggagagcgcggcgaatgagggaaaacgaaagagggggctcgggagagtgcttttatgggcgagggaggggaggacgtggccgggaaccctcccgatttggccggcgacgtggggaggagagagagagagaggggtgggattcgaaatcgaatccctccctctcgagcgcgcgcacgggccgggagatgtggggaaggtgggcggcgacgcgggcgcggagtggggcgcgaagagggacggagaaggcaggcggcgtggggaggtggggcgccggcggttggggctcggctccaaccggctaaaggaggaagacgaccgacaggtgggccccacctgtcggcgcccgaaggagagagggagggagggaggacttcggggaggggagaaggaacgggccggcccaggaaaggggcgccgagcgcggggagagagatgggccgacggcccatctagagaaaaaggaaggaaaagaaaagaaaaagaggggaaggattttcctgggattaaaattgcactttggtgattcttaattggttaaaattattttcaaggctctgaaaattccactaaaaatcttgttaatgcattggagcatggggaactcaagaaaaattccaccacgctatttccaattattaattgcatttattaattaaggaattagctctaggttaattaagataatttcttcggacgatttatttagccaatttttaaagcaaggagagggggaaacttcagggcgtgacaaacctaccccccttaaacggaatctcgaccccgagattcggaagagctggcgaagaggtgcgggtgggtggccttcaactcatcttctctttcccaagtggcctcttcctctgagtggtggctccactgaaccttgcagaatcttattactttgtttctggtctttctctcgctggtttcgaggatacgagttggcttctccacatacgtcaagtcttcctggatttcgatttgatccggacttgcctgttcctcaggaactctcaaacatttcttcaactgggagacgtggaacacattatggatgccaagcatgttggagggaagctcaagctggtaagcaacttcacctctacgttccaggatcctgtatggtcccacaaagcgtggtgccaactttcctttggtttggaagcgatgtactcccctgagcggagtgacacggagatacacataatcccctgtttcgaaagcgagctcccttcggcggttgtctgcatagcttttctgccgagattgcgcgattctcaatctttccctaacagctctgactttctcttctgcctcatttaaaacttctgtaccaaacaactggcgttcccctgtctgatcccagaagagcggagtacgacacctccgtccatacagtgcttcaaacggtgccatctgcagactagcttggtaactgttgttgtaagagaactcagcatacggcaagcttttgtcccatgctccaccaaagtcaagcgcacaggctctcaacatatcctctagtatttgattgactcgctcggtctggccatctgtttgtggatggtaagcagtgctgaaattcaaccgggttcccaattcttcttgtaatttctgccagaactttgaggtgaattggctccctcgatcagacactatcttcttaggtacaccatgtaaacacataattcttgccagatagagttctgctaatttcttccctgagtaggtagtgtgcaccggaatgaagtgagccactttggtgagtcggtcaacgactacccaaatagaatcatgccccgatgacgtcctgggcaaaccggtgatgaaatccattccgatttcttcccacttccattctggaatctgaagcggctgtagcaaacctgctggcctttggtgttctgcctttactcgttgatagacgtcacagagtgctacgaattcagctatttcccttctcatgctgacccaccaaaacttctctttgaggtcttggtacatcttagtactaccgggatgaatggaatactgagtttgatgagcctctgttagtatcaggtcttttaattccttgttttcgggtacacacaatctttctcccatccagattgttccttgttcatcctcaacaaaacctcgggcttttccaactctcatgttctttttgagctttgctatttcaggatcacttgcttgagctatgcgaacctgctccaccagtgtgggctgtgcctctagggcaatcacgaatccgtgctcaactatcccaaggttcagatgttccaaatcacgttgaacctcacagcatagttgctctacccatgcaacattgcagtagctcttcctgctcaaggcatctgcaaccacattagccttgccgggatgataatgtattcccatatcataatccttgatcagctccaaccatcttcgctgtctgagattcaaatcaggttgagtgaagatgtactttagacttttgtgatctgtatatacctcacaacggttaccgatgagatagtgccgccaaatctttaaagtatgaacaactgcggccaattccagatcatgcgtcgggtagttgccttcatgaggacgcaactgccgtgaagcataagaaaccactttgccatcctgcatcaacacacatcctagcccctggcgagatgcatcacaatagacctggaaatctttcgtctgatcaggcaggattaagactggtgcagacaccaaccgtcgtttgggttcttcaaaactcctattgcattcagcagaccagataaacttttcttccttcttcaatagctgtgtcattggcttagcaattttagagaagttctcaatgaaccggcggtaatagcccgcaagtcctaagaaactccgaacctgagtgactgtccttggtggggtccatttggtaactgactccacatttgctggatccacagctactccttgagcattcacgatgtgaccgagaaactgaacttccttaagccagaagtcgcacttgctgaacttggcatatagctggtgctcttttaacttttcaagtaccagccgaagatgctgctcatgttcttcctcggacttggagtagataagtatgtcatcgatgaaaaccacgacaaacttgtctagaaattccataaacaccttgttcatcaaattcatgaagaaggcaggtgcattagtgagtccgaaagacataactgtgcattcgaacaacccgtaccgagtgatgaatgctgtctttggaatatcctcttcgcggatcctcaactggtgatagcctgatcgcaggtctatcttagagaacacagtagctcctttcaactgatcaaacagatcatcaatccttggcaaaagatacttgttcttgatggtgacctcattgagtgcgcggtagtcaacgcacatcctcttggttttgtctttcctctccacaaagataaccggagcaccccaaggcgacgtgctcgggcggatgtatcccttctgtaactgttcatcgacttgcttcttgacctccgccaactcgttggctcccattctgtaaggcctcttgtggatcggtgcagttccaggtaccaagtcaatccggaactcgatatccctttttggtggcattgttgtcagatcgtccggaaaaaccgctggatactctctgactatgggaatatcctccagcttcttagtggttttctccactgctacctcttgttcttcaccagcagcctggtttaaactgatccttggcttctgcggcactggagactggaaggttaccacctctccttttgcattggtcaacttgatggtgcggctggcgcaatcaatcactcctctgtgccttgtcaaccaatccattccaagtatgacatctaggtccttggattcgagaagaatgaggttggctggaaaaatcaacccttggatttcaactgtcaccgacgggcaatagtgagttgtggtcatgccttctccaggagtatggactcgcataggtatcttaagcttcactaaagataacccatgtgcaccagcaaaacgcttagaaatgaaggaatgagttgcaccagaatcaaacaatatttttgccggtgtcgagttgacaggaaatgtgcccaatataacctctggtgctgactgcgcctcctctgcagacgcatgattaacacgggcctgaacgaacttgggtccagcacgtcttggcttcgggcactttccaaccgtgtgtccgggtttgttacaattgaagcagagttcgggtttttctcccaacctcttgggctgttctggcagagctggctgaactgattgagctggaatctttagtgaactcggagtagggttgaggctgtgctgctcactgttgttgtgactgccactatggtggttcttgttgaagctacccgggtggtagggacggtactgccggataatcatggtggaaggtccaccgtgatgtcccatcgtgaaacgaggcttctgactcttcccctggggagtcctgaactaagctgccttcctcttacggtttattttgttacagtgctcctcctgacggatagccttatccaccagcttctcaaagtcctcataatctctagagatcaactggttaatcaattcatcatcaagaccagacagaaacttcccctgcctctcggcatcggtacgcatgtcctcaggggcgtagcgcgcgaggcggttgaactcatgcaaatactctataactgttctggttccttgttgcagggaacggaactctctcttcttttgtgccacaattccctcgggaacctgtgctttattgaaactatgacaaaactctgtccaagtaacctcttccccagctggacgggtcaccatgtagttgtcccaccaaatagaagcgggaccttgtagctggtgtgtagcaaaagcaaccttctcctgctcgttgcattgcaaaagattcagcttcttctcaatggcatgaagccagtcgtgggcctcgattgggttggtggtgcttgagaaagtgagcggcttgacacgaagaaattctaacagtttggactgaggaggtggaggaccaaactgcaggttctgctgctgctgctgctgtgcttgctgctgcacctgttgcaacatctgatggtactgttgctgcatctgttgcatcatcattgtcatcatctgagtctgattgtccaacacctgagcaattgttgggttctcgggcggtggggacggactgttgtcagatgcaccgttggcacgtgctccattgatcggctcttcgctgccactggcgttgttggagtcgcgtgaaccattccttatctccatctgaaggggataggtagaaatatgagaaaaggaagaaaaacagggggctcagaaactaatcttgcttatgaatttaagtgcaattatcttaatcttgattaaaacactgaaaaagaggcacgcaactcctaattgaggcagtcataccactgacacatgatatcgaccgccgactaacccacaagcaacaaacctaaacacgaaaactagcaagcaaacagactaagaaggcgataaagctaagggcggcgactctgaagctcgaggcggcgcttgcaaacgagggataggactgacatctaaagtagacaagggataggaaccaattcatgctcaaatccaaattaaacaaagcaaaagaagactcaaataaataaccgagcatgatgatttttctgcatagaacaacatttttcacgaaccgagacaaaagacactaatgcaactgactaaacaataacttaatgcatgaaatagatgcatagtcatactgatacgcataaacttaccccaccgaacatagacacgacctaatgcatatcacccgacaattcccgactgactgccgaataaattccgaataaatttttactaactccctagactgtccctagtcgagaaatccagttaaataagcgaccaaaatttttcccacaaatcaaaagaacaaagcccaaaattttcccgaaacaaaatccaagtgaaaagggcatatgcataagaaaaggggttcagagggctcttaggttttccagttggcttgtcctacggtcaaggtcggctctgataccaacttgtcacgcccagaaattctcgaaccagaatttctaagctgaatgtgcattaaatccctgtccaggaccagccagggtacacaaacgacaattgttgacatacagatccacgtcttacaaaaatggaaaagattacaaatgcagcggaaaagataaaagcgagctaaaccggaaagcttgacttcagcagcgagtgactccactccacaggcaatccttgacggcagcgacgaaaccaactttgacaagacagctccaactaggaagatcttcatctctggtgtggggaaaaagagagcaagactgagtactacccactgtactcagcaagtcataccggaagaggaggtatgatgcaggatataaccaaaggaggctagaggttcttttgcataaagctagcatttaaaaacattggttgaaggcagtaaaacagttgtagtaattaatcaatattaaccaaacactgtccaacgctacaccacgttgcaacaggcccaaccaaccacctgaactacaccagttcattaagctaaactaggggtgagactaatcacggtgaatctggttgatcacccataaccgcgggcacggctattcgaatagttttactctggccagaggtgtacaactgtacccacaagacacgattccacacatgtcgccatgccccgaagtatcaccatgatactgcaaagggggaaatcgtgacaagaccctccacataaccctcccctaaccatccacaccacgctaaggtttcacccccacccctcaaaaggcagtgggcggtcccctcttgcgccgcggtgaatccggcagctggacaaccggacaccccggccgacccaactccatcacgcccaccctcgccaccggtgcctaggaaagggtcgagctatacttcagatcaagcagttacccactcccgcttgtggtaagcacggtaagtctcccagggtttcccgtgaaccggtccttaactgccatgggtgcgaccagcaaaaccatgcacccacagcccaccattcagtgtattttaattaactcacaccattgcggtggcaccaatctaaagctatgccaatagacaaagtctatgtaataatgtgatccccatatgtgtactagttgaactaagcatggctaagcatttcctaaaccaacatctagtcattttgatacccaagttgtcaatggcataaggtaaacaatatatggctgagtagtaggacccatcccacatgatattgtaaaagaatgcaacatttaatagaaatgcgggatatttgtaaattgggtacaatatgatcaaacgtattgcatgacttgccttgctctcgcactgatgagacctcagcaacgtcttcgagaaaccgcggatcgacgaaacggccgaaatctacgcgacaaacaaagcacacaagcaaaacatgctataagactactgaaacaggaaacaaaagtatttttaatggattctttgcatttttcttgatttactgagacttgaatggacttaaacggagctcggatgaattacttatgaattttagaagataaactgtgtttttactaataaagaaaagtccttaatcaatttattgcgcaataaagcccagggctgacgtcatccaaggggggggcggcgccgataggcgggccccgcttgtcagcggctcaagagaggggagagagaggcgtcggcaagcgggccccatgggtcagcggcacaaggtggccggtccaccgtggaccgggaccacgcgggtggtccaccgccggtccacgggaccgacggtccggatcggccgggaggccgatcggacggctcggcggcggctaggcacggctcggctcggcttcaaaaccggccggccggccatggcaaccggcggcgacgcgcacggtcgccggcgacggcaatcggcggcgtgggaagcgacggaggacggggcgaaaagcggcggcagcggctgaaggcgacggcgcacgcgcgaaggacggcggcgcacacgggagagagggaaaaaaggggagcggaggggagcctcaccggcgagcacggcgaccaaagcggaggatgaaaggcggcggtgacccggcgacgaggaggggcggacgggcggaggcgacacctataggaaaggaggagagggattaggggtggagaggacgaccgcaacgacaaaagtggccggccggagatggatgaaaaaggagagctcaccggcgagcgagggaaacggggtttcgggggtgattggcggcaaccaagcggtggccgaggagcggacggcacccgcgagcgcgacgacggcggcttcacggcgcggcagcggctctagcggcggtggcgcgcggccggagacggcggtaggcggcggcgtaaggggcgagcggcgcggcgacgataggaagcacgggagagcgcggcgaatgagggaaaacgaaagagggggctcgggagagtgcttttatgggcgagggaggggaggacgtggccgggaaccctcccgatttggccggcgacgtggggaggagagagagagagaggggtgggattcgaaatcgaatccctccctctcgagcgcgcgcacgggccgggagatgtggggaaggtgggcggcgacgcgggcgcggagtggggcgcgaagagggacggagaaggcaggcggcgtggggaggtggggcgccggcggttggggctcggctccaaccggctaaaggaggaagacgaccgacaggtgggccccacctgtcggcgcccgaaggagagagggagggagggaggacttcggggaggggagaaggaacgggccggcccaggaaaggggcgccgagcgcggggagagagatgggccgacggcccatctagagaaaaaggaaggaaaagaaaagaaaaagaggggaaggattttcctgggattaaaattgcactttggtgattcttaattggttaaaattatttccaaggctctgaaaattccactaaaaatcttgttaatgcattggagcatggggaactcaagaaaaattccaccacgctatttccgattattaattgcatttattaattaaggaattagctctaggttaattaagataatttcttcggacgatttatttagccaatttttaaagcaaggagagggggaaacttcagggcgtgacaataactttggttatttctctcacccaggtacagtatccatcacatatgaagcctgaggacgactttggttatttctctcacccacgtgcagtctatggatatatcactaccagaaaactcattttttatcctagttcccaaaacacagatttatcggatgtattaataacccaggtctctaaaaatatctttagtcccaattagtgataccaaccggtactaaagatgcgtttttagtatcggttggtgttggactaaatatatttttagcatcggttggtacactaaagatgtctccagggttagttaaaaaaagcatctctatttaagttagatgtgtatagtaggtgagatggtatgcgcgtgagagaatctctagtcccacatttcttttagcttcagtatatatctttaggattgagatctttagtctcggtttttttttctcggtactagaaaactaattttcgcgagcggccaaaaccaattttcgcaagcggccaaaaccaattttcgcaggcgggagagaggtctgcgccacaacgactgcgacaacggcccgcctacgaaaatggaaggaaccaaaaaaaaaatcgccggcccgcgccgggagccaccgccgtcgtcaccgccaccggcctccccctccctcctccggccagatctgggagggagggggaggggagccgcagccgccccgtgccggagccgtcgtcgtcgcagccccgcgccccgccggccacgtgcctcgccgccgccgccctcccccggcctccctccggccggatctgggaggggaggggagaggagccgccgccgccgcaccaaagccgtcgtcgccgccctcccccagcctccctctggccagatctggaggggagccgctgccgctgccatccggagcagtcgtcgtcgccgcaccgcgccccgccgaccacatgcctcgccgtcgccgccctccccagcctccctccggccagatctgggacgggagaggagccgctgccgcccagagccgtcgtcgtcgccgtccacgccgccgccgccacgtccgcgccgccggtggagggaggaaggggaggggaggggaggggacggcccggcccggccggtggggagaagtgccgttgagggagagagagggaaatgattggtggggagggggtggaggagaagataaggagttagattttttcggggtaggtacgatttttgcagcgtgaccacataagcggcgcctgcgaaaatagacgcctgcaaaaatagattttcgcaggcgaagagccaacttcaccccgatttatatttttgtaggcggtcatttggctccaagggtcatgtccgcctgcgaaaaaaagacccccacgtcgagaaaaatacattttctagtagtatataaccgataataaaggaggttacaaaccggtaataaacagccgttctctatcagtgtatgtctagctctggctggtaataacagagccgctctttagcagtgtatatgccggatctggcttgagtgcagaggtgcgtgtgggtgctttgagtttgtacgcgagtttagaagctaacagcttagagcatctccaagagagtggccaaatgcctctccaagccaaattataaccaacacatgaaaaaaatgtactccaacagcctctccaactggctggccaagccatctcgctggccaaaccatgctagcaactggccaaatctagccagccacaaccgctggccaactgtgggccccatgccctctcccccttcccgcaacctctcctcttccttctctctcttccttgccatcgctctcttcctccgacgccacagatcgcaagggagcaccgctggcttcccctctccgggcgccggccaccttccctccagcaatgttgccgaccacctcccctccagcgttggcgtcacaccttccctgccctctccatggcgaggattccagtgttgctcatccggctcccccgactgagccgccacatccggcgccgtcgcctccggcgtcgaccgcatccggcggcgtcgcctccgcccccaaccccatccggcgccgccgcctccaccgccggcctcatccggcgatgccgcctccgccgccggccgcatccggcgacgccgcctccgtccccgaccccatccggcgccgccgcctccgtccccagtcccatccggcgccgccgcctccgccgccggccacatcaggtgacgccgcctccgtccctgcccccatccggctccgctgccggccacatccggcgacgccgccccagccacatccgccgcatctcctctctacggtcgtcgtcgtgcgggaacaaggctgagagaagaggaagagggagagaaagaggaagaaggtgaagtagaagctgatgtgtgggtcccattgtcataggctcataatggagagtgtagatgaagaggctgttggagtgaggaatgagtttggcttgacaaatcaattggagagctggttatatgggtgtttggagagtctaatttagagagactgttggagatgctcttatacatgtactcctatgcttgaagggttgacgcataaaaaataatgaagtagtgataaataaacatttttctgaaagggtaacaataaaggacatgtagttcggctgcaatacttgctgcagctgctgccgtagccattaaggatctcattatttttgcttatacttatacttatcagtcaacttttaaatttttaaccttaaatttaaagctgattttgagattttttacgtatatgttaggtttataattaggatgggatttttttattttacggaggggtatactgaaagggttgacgcataataaaaatgaagtagtgataaataaatagtttatgaaagggtatcaatatataaacatgaagagaattcgaggagacgtggtgtccagataattacgctagcaacggctcttttatgcacaccgctcgagagcacaagagacgcagctaagcacgtggccccagccccacacgccacacgcgcacggaacggcaggcgcaccgcccccgtgcactctggaaacgaggagcgatcgatctcacagatactgaacggtgaatagctaaagtggtcctccaagtttcactttagattcagtttagttcttaatgttttaatctatctatattagtcctttaagttttcattttaattcaaacttatccttgaacaaaaactctcttgataaatgacatttatacccccatcaatcacatatataagagaaaaattgtatgcttgattttttttatagataatgtatagtaaattatgtaaaacgaaaataaattatgtactagcaagtatatacgatagcaattgcttaaattttatgtgcacatattaaaaaaatggtaaatatatctgcaatattgtttattcatcttgttttctcctttttttaagtatatagttgtatataaattaagggcaaaagggatattttctaatagaaatattgacttaaaaatagccatatggcatattaagtgggtccaaggatgatgtcaagtcaaaacaaatatttagaggagctatatggacaacatgaaacgtgaagaatcaaattaagccttcagtgaaatttaaggaactaaattaggtatttacccaatagtgaaatagacgaggacacccacaaccgcttcccccgcaccgcacgggcgccatgcttcgcgcgacttggccacagcaacaggcaggctggtccacgccgtcggcggcttggcttttaccgatcgctacgctttgcgagcgcatttcgtcgggggcccgcgtgcggcgtcgccttccatccgcatcaaaagcgaaccggtggagccgtgttcctcacctttccccttctctcttcttcttcttcttcccgttgttgtgtttctctccacttcactgtgctgctgttcgtggaggaggaggaggagatggcggactgggcgccggtggtggtgggggtggtgctgttcgtgctgctctcgccggggctgctggtggagctccccggcacgcaccgccacgtcgacttcggcagcttccgcaccaacggcaaggccatcttcgtccacaccctcatcttcttcgccgccttcgccatcctcaccctcgccctccacctccacatctacaccggctagtcacctagtactcttctccaatttccatccatctctctcattccctcctcccttcaatttcacttcgtctctctcctactcctatgcatactaattacttagtaatttctagctagctgctctgtaacaagggaaatatttactgcaactgtactatgctagcccgctactgagtgcaggaaactgtaagtcgattgaagctcttctgttgaatctagctagcaaagaatgtcaatttcttgttgctgcatactgttcctgcctcttcctttgtttgttcttagtttctaggagtactcatcatgtggatcgatcgagtgtcgtcccggcctatgttacatgctcgtttgttagtgtgcgcaggggagccaatgcatttttgtcagcagatcagtatacctactacgtataaaccacggttgcttcaacatattgaagttcattgcagaatttaggtcgccttttctggattctgaacatgttgttagtccgttcggtcatatatgcttatgcttcttgatcgatcgatcgttttctgacaaggaaccgagggatcaggtagctttttcttcggaaccttatactctattgggataaggagaagaccacgtgacagcgagaaatcaatcgatcgatctgccttcgtctcctgctacttgtaagctggactagtacccggacgaaatcgatgcgttactatagcgtgtacggttaatcacctatgaatcatttcttcctatacagtcggtatccactataagtcatttatgctataaagctcaaattctgtgaggccaaatcatcaagattatattgacctttagatcatctcgcgtctacgcaaatcaaccgttagatcaagttcttctcatccgatggcatctgagagaaccaatgttttttatcttcctcttaattacctcatgcatcgttatatctccctttatcactaaccacaaatacatctctcacccgaaagcctacaccactatatttgtgtctacctttttctcattccctttaatttttctaatgcatctactagccatatctaggttgatccaatggatttcctcaatcatctaaggaggaaatttaaatggtccaatgaaatttggtttgtcactgtcatagatgacatcgaaaatttattggtacagattacaacactcgatgatctttaccaattgcaaggatgtttatctcctatggtgattggattttggcactctatcatgatcttgcttctttttatatctgatttcttcgtttatcacccagcttcatataccaatgtatcacaactatggtaacttcaatttttggtaacttttagtatcgagggattggtccactctcacatttgactatctacatttgattaaaaggctatgccatatttttgtgcttttcataccaacaatcactaaatttgtttctccatggttccttccatttacttataggtgaacatttttcttgaaattactagattcatgcacctaatagttgtttttttaagatcatataccaacatatgcatgcagcgttatccatattttctctttgttttctcgcaaaaagaaatattttattagttgtttaaaatatctgaatgagatgctaagtcaatttagtacataataaaaatagtgtcatgtttgcttaccattcatggttcttaattagaatcatgtcatttattcatatagcaatacgatgtaaagatcgaacgttcaaccatgttgatcatgcaattttgataaatttacaactatatgttcccttctgtgtgatgataatataccaatagtcaaaagttctagaattacatcttccaaattcacgatatagctatcccacagcaacgcgcgggtatcaactagttgtctttgatttttttactcccgaatgagaaattgtgccctattttaagtaatttataatatctaataataactttatgatagtattttttaagataaatgattccattttctaacaaagcatttgaataattaataacagttcagtttttcaatagtttgtaggattttatcccagaagtcaaatatgttcggtactttactttctcatcttttatttcctcgtttttactttaaaaaatcctttcaaagtccgtatgtgttatctagatttctaaactcttaaactacattctaaaatacattttgggtgcctgaacttattttagatgttatatacgtctaggctaggtccaatgtattctatgagttgacatgacatgccacgtgttggtttagcccgcgtatcaatcatataaaagaataaattaaaacagagaggaaaatgtttttaatttttgaaaaaaaaagaaagagaggagaaaatgatgtttttaatttttccttatgttcctgatatgttagttttactgacacgtcggcgttatcatgacatgccacgtcagcgcaaaggagcgacaacagtgtttgaatattcaaaagtatctttttttttttagagttcaaggacctaccccctccatcccctgtaaacctaatcctaacaacgaatatggacatgcatgtgttcagatttgctactaggattagattctatttgggacggagtaatatatgatatgcccatacaatttttaaaattgtccgtgcacttcattcaatccatatattaatcatttttgttaatttttttagctaataattaattatctctttttttcacgcgctaataagttattggctgttcaaccagtaaataaaatagaaatacttatatcgcctctgtttaaatattgaaaataagctataatatggtgtggtggtattatagttattcagaacgaaggaatactataaggtgtattggggagagaaggttgagaacatctctttcacacacggaaaacggggtgactaaccagtgcatgatcaaaaataagtacattttttcccattaatcctttttcccattgatcatcatattataggaaagcatcaagattaagaaaaatcaataactcttccgtacttggtaataaacttaatgcgtgcaccattcccactatttcttagtcaataacaaacgaagacattacatgttcgttgtaaatgttgtgtgcgtggatgtatgcatgctatctcatgcataaataacaaatagtcctagtgaattgaatattaatatgatggtcatttaaaaatagcctaacaaaaccatataataatctattatgaactgagggagtattagctataaaaaattagatcaacattatcttttaaaacaattttcttatagaattttttctaagaaaaacatgtttttttgcagttcgggaagcttgcggctgaaaaatgagggagtaaaacttaagaacacgctatgatgggaagttatatgtataaaagaaacgaaaatgatagagttgcattgaatctgtttattttatatttgaggatggtaggagtattttggacatattggttggtgggatgtgatgggttagattggaacaaatctattttttaaggtgtttgttttgggacagatgagatgaaatgaccctaaaaagaaatataccctctagatctaggttagctttatcccttaaaaattggcatattgtcgatgggatacctgtgaactgtattctaagggtattggggtacgttgatacgaatatctatatgatacgacattaagcacacagaagacaaagattatactggttcagacccgtcgtaaggtaatagccataatccagtttatatgagattatgaagaaaaccgcagagtacaatagagaacaacaatttccgacaaaatccctgccgagaactcctcgatgagatgtctcagtaaatcggcttcaagtcctccggattgcttctgctatggtgggtgtcttacgatacgatttgatgatctgtatccccaaggggacctgtatttatacagcaaattaccttagtctccaagtaaggcttgagaacaacggaccacatacggtaaaacaacttcattatctcctccgagtaggactctagcacgttctattcatagagattatttccttaagaactcatcgatttcctttaactcagaaggattatttccgtacacttaggatataccgtattcttatatctcatgactccaaaaataaagggtatgctttatcctaaccctgacatataccaatccaactaaaattttatctttaattgacacgtggaccatatattccaaccctatttttttttaccatttcaacccttgtcccaaacacgtagacagagctatcccattaaaaactaaagtataatgaacctgatctatactagttgatcgcaaaccaaacacacagaatgtgttagttctgtttctcttcaaatttctttttgcaaaaaccaccacataaaactcacactgatttttcattacaactaaaaatagaatgggtatttataataaaataatttgtgagatagaacgtcaaacttcaaagggcccctttaatctgaaggatacacgtaagtactttggaggatttcaaggagaaaaatcctatgaatatctttaaaacaaaggattgaaatttaccttatcctatgaaaatcctatgaaatgaacaattctatagagattttaaagaaaatttagcaggagattcaacctctggaaaaaattcttttgaggctatctttctcatatgattcctatgtttttttcctgttgtccaatcaaacggtaattacattattttttctgttttacaatactctatttgttacctatatctattatattattaaaaacagctttgaaaggaggcaccacattcgctgtgggggctagaagttcccacattaatcggagaaaaagagaaaaatctataccattagattgtaatggattaaattaaagggtgtagatttatcagaaaaaaatctcaaaataggaaagtaatctaatctttcacatacattacgaatatgcatgcatgcatgtctgagtcttgattgtatttgggctagggtgttttccgattggggaaagaaaaaaaattgaatactacatggattccaaataggaaaaagaaaatcaaatggacagctttttgatacagacgtggattcagattttgaagtgaaaaaggaattgaactatcactggatctggccacagctaactcaatttaattgatgcattcaaacttgcagccaaataaaattcagaagctagcataccgtaatactagccggagatgaaaaaaaaacagcacacccagactaccaatacaattattcaacaatctatttagtccttactccctccgtcctattttaaacgcagccatgggtttccatgttcaactttgatcgtctgtcttattttatttttttaaaaaaataagcgcataaaatactattcatattttatcatctctttaaaaggagacatcatgttcgctttaggggctagaaattcccacgttaatcagataaaaagaaaatttgaaataaaaataagcattattaaaagaaaagtccatataagaactcaatatgagattatttaatattcagaatataaataaaataaaatccaaaattagcaaaaaaaaaagagtccaagtagatatacaattaaaaataactgaaatacggaatcagaataaagcaatattgaaagaagagtccatataaaaacccaatactagatttattaaaagtttaaatgaaaaataaaatgaaactcgaaattacaaaaaaaaaagaaaacagttcaattaggaatataatttgaaattaactgaaattctgaattaaaaataagaaatattgaaagaagagtctatataagaatccaatacgagattaattaaaattcaatataaaaaataaaatctaaaattagacaaattaaaaagggagttcatgtaggaataaaattttaaaacaactgaaattgaaaataaaaaaataaaaaaattaaaagaacacaatacgatattaattaaaatttgatataaaaaataaaataaataaaaattaggaaaaaaaataaaataagatttcaaataggaataaaatttataaataacaaaaattggtgataaaaaataaatactattgaaataaaagaccatctaaaacatattaagagataaattaagcaacagatctataaaggagtagaattgaggtggttgatgggacatttaaaaactttttataaaacaccaaatagaatcctaataacgattaaaaggagggacaacgggtaggccatgaagaaaccgatcaaggcgtttggcgggacttctagaaagtaaaaaataaaactccaatgataatcatattcgatttttgaaatctcaatgataataaaaaggagagatagtgggcgggtcgtacaggaggacagtggcagtggcagagccgccaatggttggcgggacttttagaaagtaaaaaatgaatttcaatgatatatgttcgatttttagaatctcaatgacaataaagaagagtagacggtgaacggttcgtagagaagtatagtagcaacgtttgacgggacttctaaaaattataaaaaatgaaacccaacgagaaaaaaaaactctaaaaaccacaggtccaatgtttaaagttttgggacttctaaaagtaaaaaaaaaaacccaaataataattatgttcaattttaaaatcttaatgactataaagaagggaggcatcgggcaagccatagaggagtacagtagcagagtcgctgaaggtttggtgggacttatagaaagtaaaaaaaatgaactcaagcaataattatgttcgatttttaaaatctcaatgacaataaagagaaaggcagtgcgacgggccgtggaggagtataatggcagcgtttaacgagacttctagaaattataaaaataaaatccaacgaaacaataaactctaaaacctatacgatccaatttttaaaggttccaagaagaatgaatagatagtggtagatcaggcaagcaaataaaaaatgtaatgatagaagtaggggtaacaattgtgtgacttttaaaaactataaaattagaaacacggggatgataaggtttggtcgttcaaaatcttaataacaaccagatagctatttaataaatttaaagtaaaatcatattaaaaatatataattttgtatggtgctagccgcgcaattgcgcgggccacccagcaagtttctattaaaatattgtttttttctattccctcatttttttcatccgacaattgaaaagggctataatttctttttttttaaaaaaaagtactggtttgggcaagtctccgctcgactctcgagcatcagcacgtggcgcgcacgtggccagccaaatcccgtacggctgccacgcgtcccgcatgcgaggcgcttctccgtcgaccgaccgcgacgccggccactgccaaacctccaatcttcccccccccccccccccccccccctctcgtccccgtcgccgtcagccgcccgccgcactcgtttccagcgatcaccgcgcgagacgcgccgtgaagaatctcccgggggatccatgacggcgacgttgaatcagtcacactgattccatcccaatcagaggaggcgctcgctggtcggtctatgctgctgtcgatcgaattaagccccaacttcgtcgtcttcccttcttcaattcatcatcacttcggcttgtgaaattagatccatggatccggagacggcggcgttcgtcgggcgagatatcgatgccgccaccaatggtggtgaggtagctgaggagaggaggaggaaggttgagctggtgcaggaagccatccgtgagctcctggaggagaagaggacgggggagcggcggcggcggcagggtggagatggtggtggcgaggaggctcggcgagatcacgaggaggaagaagacgatctcctttcctcgttgctctccaaggtatgcacgcatttcccattctgcacgtactctgattgatgcacagaaaactcatcgatcgaatgcatttcttatagtatgtacgcaatccaatgatgtttatggttatggatacactagttttagggcgttagttacagaattgcagacatacgcaacaattgttcatgcaatcatgctgaaataacttacattcagaagttgtagaatagacagagacaggcaactgaatgtcaggatggtgtttccttagctccttcctttgcatcttgaaattggaattgaacatacgtagctctgcaattacctgctgtaacctacatttgttttcatcctttcttgatgagaaatttgataatgctgaagcctgaaatcgagcctgaatgaacattaagtttcttgccacaggtggatgcgctgcaaaatgatgccgctttggaacaagtgaaaccgaattgctcccatcctaatcctgaaatcagcaaggaggtcaagctaggcgacgtagcgaaagacctgaacaaaatcaagaggcagaacatgatcacccacatcctactcggcacggtcattgtcatgactgccgtctggcaattcaacgaggtgtcgttcctcctcgccgtgaagagaaagcttagcaatcctttcaagtccttgggggacttgatcaagagttcgctgaaggggggagggaagccgatgatcgaggcgccaccgctgcctccagtcggcgtcccggatgttacccggaatgatttgccattgctactcatcagcaacggcaatggcaacaatgatgactgagaattagtgagatagttatgcccacaaaggtatgaaagggcaactcctcaatggaaaattggaaatgctgtttgttggtttctttatttgttgcagacttttatgttgatcttggtatcaagtggaaatgtgcacctttttaaggattgaaagcaagtgcacgtttcttcacttgttgtaaagatatttgaattttttgttattaagcagttagtttgtcaactttaaatagcttaatcatctcaggctctcagccacaattggttgtcctgtccgggactgacgttccgtgagtttgctgttttcaagtaagatgcaatgacaactgaaaacttgctcggtcctctgaactgttcttcttttgctcaacggccataaaacagagaactccaagctccgtcccaatatgtagaaatagctaaattttgaggctgggttagtagtcgtaatttcgtgaagaaagtatacatgcagaaattgcagatactatacgcggtgttcagttaacccgcagtgtggctactgacaagcaagtcaatgggattatgcgaaccttccgattcccgcaggcccaagaaatctactgggattcaggaaggagcatacagtcgatgcgtggtaatacaccgattaaacatcgaaaatgcttgaagtcggacaaccggtgcgggggagccggatcgggcgctccccccgcgcgcccctcccaccacgtgcgtacctgttgagcccacccacttctctctcatttttagaaagatgtttcacctagtgtacttacaatgtttcactatttatttatagatatattgttgcagttaattaaaatactctattccaaaaaaaaacccacatattttggaaactttctattaagggaatttggtttattttttgtcccaaaaaaatatttcacctagtgtactcccaatgtttcactatgtatagatctaatgttgcagtgaacgaaacattccattgcaataaaaaaacccacatattttggaaaccccatattaagggaatttggtttattttttttccacaaaaaatgtttcacctactgtacttccaatgtttcactatatatagatctaatgttgcagtgaacgaaacattccattgcaataaaaaacccacatattttggaaaccccatattaagggaatttggtttattttttgttccaccgaaaaatgtttcacctaatgtactcacaatgcttcactatgtatagatctaatgttgcagtgaacgaaacattccattgcaataaaaaaacccacatattttggaaaccccatattaagggaatttggtttattttttttccacaaaaaatgtttcacctactgtacttccaatgtttcactatatatagatctaatgttgcagtgaacgaaacattccattgcaataaaaaacccacatattttggaaaccccatattaagggaatttgttttttttttccaccgaaaaatgtttcacctaatgggccacttatctctcctttttttagaaagatgtttcacctagtgtacttacaatatttcactatttatttatagatttattgttgcagttaattaaaatactctattccaacaaaaaacccacatattttggaaactttctattaagggaatttggtttattttttgttccacagaaaatgtttcacctactgtactcccaatgtttaactatatatagatctaatgttgcagtgaacgaaacattccattgcaataaaaaacccacatattttggaaaccccatattaagggaatttggtttattttttgttccaccgaaaaatgtttcacctaatgtactcacaatgcttcactatgtatagatctaatgttgcagtgaacgaaacattccattgcaataaaaaaacccacatattttggaaaccccgtattaagggaatttgatttattttttgttccaccgaaaaatgtttcacctaatgtactcacaatgttttactatgtatagatctaatgttgcagtgaactgaaacattctttcgctatttgctaaatcattgtttttatataaggtgaaacaacacccgatttaaacgagtgaaacattttcgatatacctagtgaaacaattccgatatatctggtggaacatcgtgcaacatttaaaaataattcaataataagctagcaaaatttttgtctgaatatatccgtgtgtggtcttgttttgaagatttaattgcaacgaatttaatggtgtaatcggatcatgatttggataagtaatttaagagaaaattcagtttaaaatagttttgcacgtaaatcagatgctgacgtcagcgtccgatttttctccaaatcgatcggacgcccgagccgtagagtcatccattaaacatctcaattggattgggttaattggatcgggtttttcgggttgcctggaattcggttttcgtaaaatattaaccaaagaaagttttaaaaaaatatcaaccgagtaaaataaagcgaagaagatcggtttggttttatgagggttcagtttttactgagaaagatctatgccgcacggtcgacttttcgcgagtatgcacggcctttgcttgatttggagagagggaacatgatttagtggagtcatgtattttttgcaggaaaaagtatatcgaaggtccctcatcttgtcatcggattacaaaatcgttccccaactacaaaaccagatatatatcatctctcaatttacaaaatcgggtcactttgtatcctcaggcggttttaatcccggttttatccgacgtgacagctgagtccgtgtgggacccgtgttggtcccacatgtcagggtgacacgtcatcaccctctctcccccctcttccctcccttcctcggttcctcctctctctctctctctcaatcttctctggtaggccagccggctaacgggtggggacgaggctaatggggcaaggagggaaagaaggagggcggcggcgcaggagaacggagagcatcgccgcgcgtgcgacctcagggttggaccgtcggagaggcctgggaggcgggagaaggaggagggtgtcggcacccgtggcggcggcggcgatgcgggagaaggggagggcgtcgccgcacgggcgagttcgaggatggagatcctggcagcggcgaggtgagcgacctccacggcatcgcgcctgccgttgaggacccccgcctccctgtcgacgacccacgcaagcacgcacttgtctttggcgacccaggcctcgacaaacctagacatggcgggctcaccgcccacgacctccgcgccattgccgacagggcctcgggccttgatgctactggacacggcgcgtcggcaacctccctgtcctcgagctccaccacccaacggccaccaaggacgcccgcacacgaccgctgcacgccccctcatcgtcgttcacgcctcgctgccacctccctaggcctatccttggccgtcgcggagcttcgccaggctgccgcctccccgggcccatccttggccgttgcagagctctgccaggctgccgccgtgctttcgcgatgctgtggaggtcacttaccttgccgccgctggggtctccgtcctcgagctcgcccacgcgacgacgccctccccttctctcgcatcgccaccgtcgtggacatcaacgccctcctccttctcctgcctcccaagcctctctgaccccaagctcacatgcgcggtgatgccctcccttctcccgtgtcgtcgtcaccgccgccgccctccagctctcccgcctcaccccgcggccggcctaccagagaagagtgagagagaggaggaagggagagaagaggtgggaagagaggggatgatgtgtcactttgacatgtagggcccatgctgacttagctgtcacgtcagaaaaaattggggtcaaaaccacataacgatccaaagtgaccctgttttataaattgagggatgagatatatctggttttgtgctttgggatgattttgtaatactaatggcaccgcgctgatggacgcccgcagcgccgccaaggccgtcttgtaatggtgtctcacctcatccagcgacagaggtcatgaccatggatggaaagagtagttggcaaaaacaaatattcctgggcttgtcagcccaagaaaattcagcccaattaaggcttgtttggaacaaggagccttgaggattttcgcaagagacacgaatttcaactgacttctgtatgattcatgtgtaagacaccgaggctggtaaaatgggagcacaatctatgatcaatcaaacaagagttgaatcctgcagactcgcagatgttctgaacaactctttgcatcgcactagctaccgtacgacatttctactttctcacttgcatcaagtactctgaacctgaacaacaacagcccctgcatcagccactgcattcctttcagccctgatgatcctggtgattcccattagatctctctttcagcctgcttcactgcagtcatggttccactgcaattgcagttagtagtggccatttctaagaatgattttttttgtgtaaggtctcggaattcggtcgtaacaagatggaggaacattcatgcaatctactgtgaaaacaaagccctggagaagtatgaatatgatacattttcttaaactggactgtgatgacaccaaactaaacgaactccagtctgacagatttagtattaagtaaactttgcattgctcagctcaagtaaacttgcattgcatggctcctagtcccagcagctcagatgctactcctgcttcaagttgctaaaccattaaattgcatcagctagtgcaagatcagcttctgggtgtttcagcattcagatcctgagaaagaagctctcaactgctgcctatccaactcacattgcattctgctctctgcatatctggaacggcctgcgcactaatatcttccaactcatttaggacgatccacatgcagactacttgcagttgcgtactactccaaagaaatgtaagttggaacctggaacaccaaattgcagttgatctttcttcagatcgaagggtctatgagaacaaaacattcagctgctcaacacaaagacctaatgcaattgccaagatatactccagaatggatcactccacagctctgccgctcagtgctcatcagttccaggtttccagccacaagtgctctttcttgagcaacttgctaacaccattgcagcttagcagttagtagcttatcagcatgtttctgatcaaacataatgagacatgcatcttctactctccttgaagtgacagtgctttgttgtgatatcatgatatggccaatgctaatgacctttgttaaccaccactgcaataacaacaactagagaagcagtactagcaacagtgtcagtgttttagctgcaatagctatacaattttttcagctggcacagtacagaaacgctaaaagtagtgtgtgtgtgtgtggtcagtgatgatgatgtggaagaggagtgtgtgtacttaaaagaggtgtgagacatgaaggatgggtcccacagtgtgcagaaagttgctcaaacgcatacacgtacacaggcacaggggcaggcatccagcaacagcaacaataaaaaagaattttaatagtatactaagggttaagagagacatttcctgtactatgatgtgaaaacctaaatttgcccctggggttcggttaagccaaccacagcagcgggttacccactgagacgaggtttactgaaatacccccggaataaagtgccagatatacgtataaaataattgttcatacacgtatagacagggtggttttttagtgggcccacaaggggtatttctgaccttctcgcatgtgggtgacctatgttaacatcaaaattccagccatgattaggacagggaaaagctgaagttgagtttaaatcggtacccaggttattaatttgcttcagtaatggtgctctttattagggcatgaaaatgacagaaaagcccctgtgtttgtgctaactatggttaagtttgggcagacatgaaaattaatttttggcatcaaatgaggggggcatcgaaacaggttggaattttttttaatacacaacacatggtctagtttttttttcctaccactagtagcccaaattttctttttgagtttgactacaagtttgagggaaaaaagttcctgttttttaagccttcaaataaaatttagggaaaaatacaatgttatggagacgaaggaggagaaaagatataccggtgattagagggtacggttgcgcatgtaaaaacggacagaaggaatgatggtggctcacggagaaagaatggtgatggcagtgtgtagagcgacaaccggttgttgctgatagtctgaggagtatgttgatggcgtaattctcaaccgaattaattatggcctcgttcttttctccaataaaaagttggataaacttttggatactcgtggcatgcttttcaaactgataaacggtgtgtttcgtgcgaaaactttctatacgaaagtcattctaaaatataagatcaatccaattttctagtttgtaaataattaaaacttaattaatcacacgttattaccacctcgttttacgtgaaacacttatcctcgtcttcaggagattcaaacaccacctgtatgtttttctctgtatacataatacatatgtatattatgtgagccacaccagtcatcgttatgaagtactaatagctactgtagtttcaatgtaaaaaaaagaaaaatgggataaaggtgcagtagccgagtatcttccccgttccccctgcgtaaaagaaaatctcccgtctcgtcgtctcctccgctccctgcggcaagacgagccgcggctgaacaggggaggggcgccgatctccatccagcgagcagagcagcggaggggatcctggtgagcatcacaatcctctctctaattcatccctctcccccaccgggagtagtttttggtctgaaattttttgcttgcggtcgttaaccctagcttctctttctagtctagatctgtggtgggagaagctcttctcttaatttcagagtatacaagtaacagtttgttgtttgttccccccaaaaaagtttgggggggttcaactgaacccaccctccatgtcccaagttggatccgcccctgcaatctttgctcctgctcaggaccaactggttgctgatcgattgcggaagtgaggatggacgtggagctgaattcccgtgcgctgatggatgaagctctcaaagcaagggatgcggctgagaggaagttccacgcgcgtgatgtcaagggtgcacggaggtccgcaatcaaggcgcagaacctgtgcccgtcgcttgacggcatttcccagatggtctcgacgcttgaggttctgcttgcttccgaatcgaaggttgacggcgagaacgattggtaccggatcctgtctctcagtgcctctgctgatgaggaggaggtgaagaaacagtacagaaagctagcactccagctgcaccctgacaagaacaagtcggttggtgccgagggggcctttaagcttatctcggaggcttgggccgtgttgtctgataagagcaggaagatgcaatatgatcagaagagaaaggatcatcctgtcactaatggggccaatggtttgtatacttatgataagaaagctcacaagcgggctagaaagaatgctgcggcttctgcggccgcagcagctgcagctgctgctgcagcagcagaggctactacacgtcctgtgggacttgatacattttggacatcatgcaatcgctgtcggatgcagtatgagtacttgagaatttacctgaatcacaaccttctgtgcccaaactgtcaccatgcatttatggctgtggagactggatatccttgcaatggaaccagttcctcgttctcctggtcaaccaagcagcagcagcagaaccacaagcactcatatagctcagcaagcagaacctctggtgttccaggaacgggacatggtgtataccaacaagagaacacttacgagacctacaacaaccaaagcttccaatggaatcagtactccaagacaaataattctgctggtacaaatgcttacagtagtactgcctcagagaaaccaaaaagaaaacatgaggagagctatatatacaattattcgtcaagtggcaatgagtttgggcaggagagacctacatcaggacgggggcgattttcaaaaaggaggcagaatattaataatggatatgcttctgttgattgtaatggagataacaaggaaactgtggctgcaactgcaggaacaactgtgcttgctgatgttggaagggttaatggtacttccgtggagaaattcagatcagcagtaagtggaagaagagctaatgtcatgagggagatattccaacttgacacccgaggtcttctcattgagaaagccaaggcagcaatccgtgaaaaattacaagatttgaatatttcagcaacaagacatattgcagccaaagggaaagcagaaagaaaaaatcacgtggaccacgatgtaaaggggaacggcatcctccctcataatccaagccataaattcaagatatgtaactcaaaaggtgctgatgttgaaaatccagcaactgatgagaataatctggaacagaagcgtgtgcctgtgtcaattgatgtcccagacccagacttttatgattttgataaagatcgcacagaaagaacttttgataatgatcaggtgtgggctacatatgacagcgaagatggcatgcctcgtctatatgcgatggtgcagaaagttatttcaaggaagcctttcaggatccggatgagttttcttaattccaagtccaatattgaactgtcaccaattaactgggttgcctcgggtttctcaaagacgtgtggtgatttcagggttggaagataccagatttttgaaacagttaacatcttctcccatagagttagctggagcaaaggcccccggggaattatcaagattgttcccaagaaaggtgatacttgggctttgtaccgaaactggtcttctgattggaatgagcttacacctgatgatgtgatatacaagtatgagatagtagaagtgattgatgatttcactgatgagcaaggtgtgactgtcattccattgctgaaagttgccggtttcaaagcggtcttccataggcgcacagactctgatgtggttagaaggataccgaaggaagagcttttccgcttctcacatagggttccttctcgactgctcactggggaagaaggcaataatgctccaaaaggttgccatgaattagaccctgctgctactccagttgaccttcttaaggttatcactgaggtcaaggaagttgccacgacagaaatttctgaatagtacccatcaacctggatccctaaaaatgccatgccaaaaatgcactaactgggtgatgatccgcgttatttggctcttagctctatcatgtgatctaacttctagctgatgacttggactatgttaccagggtaaacagctaatgttgaaaactcctgaccattaattttttaaggcttttctatgtttaattttattttaatacggtatcgcatagaggaaaatataaccagggtgccacttatgatgatgaggccagttgccaaaggcatggcaatcctcattgcttgctaagaggtgtcactcttccttactttgtaaggtacggtagttctgcatacgagcttactagacagctgctgggcttctcactgtatccagtctgtaatctgtactcatttacttaatatgttgtatttccttaatccatagtattcttagctataccttttcaaattcagtgattgttgaacactggggagtgattctgaatgttaatcccatatgtagttgtggactgtggtactggtaccctaattatttgctccatgtctcaatacattcgtctgcacatgtctcaataccctaattattttcgaatgtcgattgtgaactgaaaggatgatctgggatctgtgtctaattttttagttatactttctgttgccgttagcagaaacatacattttattcatttgtaagcattgcttactctttttttttcacaaaaaaaaaaatccaggtatgcatgtattgctatcagaaagtactggtgatgctgtagagagccacagactagctggcattttgtccatttctaagcgattattacttttctgcccatttattttcacaaaatcggggttcgtaaatatatgtattcttacctggagggagcgctacggactggagtaattctttttgtatatactccgtatatctttccagaaatgctccgattgttaacactcggtgcaatgtcggttttcgcgctagcacagcacgctcgtatattatttactgtgtagtgtcattccagatgaatttgtttggatgtataatttgcgttatcttattttcagaattaagattccgaaggatccaagtgatttgttatcagattctaccattaagacgatcaggctaaaaagatgatcggtccacatgatatttcctcgcaagctataagatgatcaggctaatgagatggattcaggcattcaggcttcagcggaacacaaacgagtgtcattctgcatgcttgacaggatcctaattgcattttacgacggtttttggtcataatgttgggaaccagcgttattgtccgaggatcatgcaatgagataactaaaatattagaatatgctgctgtagtgacccaacagtgggatcatgggcgatcgattgatggggtaataatgcggtagtggttcacaaagaatgaggacaccccaagatataaatcttatccatatccctgacggtccaataatcaccacatacatcaatagtgcagcagaccacaatatgtagaatctactaaaatcgaacatagtttttttgggtacaaatatctggtgataatcctccattccagaaaacatctctttccatgtagcaactacgatattgtaaggcagtatttctttagagattgatcacagaggaaatcaaagttgcgatagtggcaggcattgaactgcatgctgtctcaccttctcatgcaccatcagtgagggtacgctttgatgtgctgatgtataaaactgcattcacaaggcatgtataagaaagtgcactgtgtatcagaatatttgtcgtataagattttgcattgtacgcataccattgtttcctcgtatgaaagcgtcaccgtacttgttcttcagctgaccattgacatattcttccgtttgctccattgcaatgttcatgtaaccatcaagacaagccaaaatacctggttcataccaatgaaagacatttgaaatcagctttttacgtaagcataatggaataatcaaatttcactggattttgttgtcagttaatatttttgaatcgaaaaaagatacaggaaaattcaaagtccatgcacattaaaaacctaactagtgaaagcttaaaaagattataacgttcatagacaagcaaaggagtattaaggtaggtttgcaatgtagactctagtgtttgcccatttcaaagaagtaaatgtgcacttcatagacacatcattatagtgttgctagtttatatataaggtggtgcttaatcgctaaacttcatggatgcaaaaccagaaactaactcacttcattgacttttgataaataacttcatatcttcctctctacctgctgttctagtgaccactatgatgatggctttaagcaaattcctagagcgaactgtggtttaaacaaattcctaagatcgaagtgttaggccttgtttgtgaatcctgatcccagatggtatcctggtaggattggaccacccaaacaaggccttcaactctgaagcatgttactaataggttcaaatccagagagaagggtactttttttttatagatttactattcaagacctcaaaactctgaagcatctcatgaataggttcaaatcctgctctagcagacagcagctttgtttcaaagctgcattttcatctgaacatgagggtcatatttggcaactattcaacagtcccaaataataattttggcttgggttggaaatgagcccaatagggttggattaccttacacaaaataccctacacttgaagttaaatacatatgtacatgcgttcttaacagtgaagccagaacttggggtaaataatctaaattgacattgctattcaggatcctgcaaccttgatgtcaggagtatatgtgcaattgtgcagttaatgttgcttgtgatcggtgaagtatgaattatgaaatcaccaatcatatcagcattgatgattcttatataaccttgcaatatgtgctcagagtttcaacttgcttgttttttttaccaaactgtagacctgagcatatcatatgctgcatctcttcaagttcattgtttccgacccatcatgactgtatgtgcatgagtatttttgtagtgtactagcgtgggatgctttgtgctatgaaatgaaaaactggtgctagagctgtgggagaaaagggtcttagggtggacattgatttagattgaagttttagatctccaatatattctttttcaatactttcctcgcttgctctagatcataaactaatcaagaattctgcctacttgttctgactaacatttagcttgaagatgatgtatagtagtatgacagatcaaccactgacctgaatcacgctcacaggttaggttcacattatttgcaagcagatagaatatgcttctatcagagactacaccatctggtgttcaaactaaatgctgataaacatgcgtgcacgagaagccaggatggatgagttctacatacatgggattagtctacaaccagccttttaaccttggctcaaaaacagaaaagagaagtaaaaaggaaaaccacaccaggcatagaactcactaactcagcacccttgtttcactaagcactggcagtctggcacctattttataaaaggtaccttattgttccatttctaggagtacatagttccaaacttccagctgtatattatcattccacaaatgaaattccatggaaatatgggccaaaagctaacaatttgttaaaagagatgtagcagtggcacaaaattgtaagaccaatgtcaccaatcacatactaaatggttgtgtcaagataagtggctgaataagtctacatgttaaccatcaaacctggtaacaggtacccgtaaagtcttcactcctccccctttctctctagttagcggagacatgacaaccagtcatccgattaggtttatagtggcattgcaagcagtcagcaaatgaataaatgaaagaggcaatcttcatggtcctcttcatcttgtctcacatgcgagttgattttagaccaacacggtaactcaggggataaaatagatttgttacaaatttccaataagtaagattccatgaaattggtgatagtatataatgattttattgcacaagctatgcattgcagctactgattcaacactattcagaaaaaaaaagaacaagtgtatttctggtaaaactgttccattcaaaatctagtccacgactagtccatgatttggtcgtgtgaaaacaatggatgcactatatagtctctagtactattctattgtactaagcactatatatagtattataaactacggtttatggagtagccagcaagacaataagttaacaagaaataaatttaaagtactaaacacaataagccaattagcatggtgaaatgatgatttgctatgactaatctacgactaattgtgcgacttgctatttggtcgagtcgtagccctctagtcgtctgacttgactgacgttatgactagtctacgacttgataacagcgatccagatgtcttaagtgatgaggagaagaaagaactaccagaaagtaaaccttatatgcatagttacatacacaggtacacttccgaaggccccaatcaatggaataccatatgctcttattaggctattatatggttctgggtaacaattaaatatatcatgggtgtaccgccaatgtgaaattgagaactgcatacacatagccacattataaaatataaatgcactatgctcctgatcatggaatgccaaccccttattatcaaacccaaagaagggaaatccctttctatctcaagcatgcacaattacctttgtttagcataaatctatcaaatattgcaatgcaaaccttaagcacagatgtcctccctcttaaatattaatcataatcctcagtaaatggacatacagcataaagtactttaaattaccataggttgaattggaaatattctttttagtagctcacagaaaaatgggtactaaaactaactattagtaaacataaaagccccttaatgataggagggctctacacaagacagtcagtagcatgataaccacctacaatgttgttcctacaaataaaaatactgtagcaatctcttactaagttaaaacatactgaggttctagggtttaaccataagtaattagaatatcaaaatagctcaagattagagaaggtcctacagaaaaacacggttatctgcttctcaaatggcctagctacaccgggcactagcaggatcttaaacagcactaaaataagtatctcccttggtcatcaaatcgaaaagaaaatcctacagagtccacgcctttccttccccccactaattaacgaaaagaaacgcagagttccaattaaggagaaagagatacggggtacaacaaacatcgcattcgtctcgtgctagggttttcgggaggcgggtctagggttgaggcaaaaagggggagggaattgagcagggggttaccgcggtagtcgacgccggagttgagcttgacgacgacggggcgccccctgatggacttgaggaagtcggagggcgtcttcaccgccccgccgccgccgccaccgccgccgccgcccgagccggacttctcgccgccactgctcatcttgcgctgcgtttgtgcgggtgcgggtgcgggtgctagactgctaggtctcgcggttgcatccgcatccgactttgagatcgattttttatcgggttctgtaccctccacccgttattgggactgacccacctgtcatcctcatccaatcgactgacacgcgggcccagatcgaccccgacgtggctgtgtgtcatcctatcccaccgacatatggggcccactgtgacgtggccccacacgatcccatccgagccacacatcgcctcacgctgcgtcaccgcgcgcggacaaaacacccacacccccacactctccacccctctctccctctcgcccaaacccagaaaccctcgccgccgccgccgccgccaccacccaccatggctacgaccgccgcggccgcggccgccgccctgtccgccgccgcgacggccaagaccggccgtaagaaccaccagcgacaccacgtccttcccgctcgaggccgggtgggggcggcggcggtcaggtgctcggcggtgtccccggtcaccccgccgtccccggcgccgccggccacgccgctccggccgtgggggccggccgagccccgcaagggcgcggacatcctcgtggaggcgctggagcggtgcggcgtcagcgacgtgttcgcctacccgggcggcgcgtccatggagatccaccaggcgctgacgcgctccccggtcatcaccaaccacctcttccgccacgagcagggcgaggcgttcgcggcgtccgggtacgcgcgcgcgtccggccgcgtcggggtctgcgtcgccacctccggccccggggcaaccaacctcgtgtccgcgctcgccgacgcgctgctcgactccgtcccgatggtcgccatcacgggccaggtcccccgccgcatgatcggcaccgacgccttccaggagacgcccatagtcgaggtcacccgctccatcaccaagcacaattaccttgtccttgatgtggaggacatcccccgcgtcatacaggaagccttcttcctcgcgtcctcgggccgtcctggcccggtgctggtcgacatccccaaggacatccagcagcagatggccgtgccggtctgggacacctcgatgaatctaccagggtacatcgcacgcctgcccaagccacccgcgacagaattgcttgagcaggtcttgcgtctggttggcgagtcacggcgcccgattctctatgtcggtggtggctgctctgcatctggtgacgaattgcgctggtttgttgagctgactggtatcccagttacaaccactctgatgggcctcggcaatttccccagtgacgacccgttgtccctgcgcatgcttgggatgcatggcacggtgtacgcaaattatgccgtggataaggctgacctgttgcttgcgtttggtgtgcggtttgatgatcgtgtgacagggaaaattgaggcttttgcaagcagggccaagattgtgcacattgacattgatccagcagagattggaaagaacaagcaaccacatgtgtcaatttgcgcagatgttaagcttgctttacagggcttgaatgctctgctacaacagagcacaacaaagacaagttctgattttagtgcatggcacaatgagttggaccagcagaagagggagtttcctctggggtacaaaacttttggtgaagagatcccaccgcaatatgccattcaggtgctggatgagctgacgaaaggtgaggcaatcatcgctactggtgttgggcagcaccagatgtgggcggcacaatattacacctacaagcggccacggcagtggctgtcttcggctggtctgggcgcaatgggatttgggctgcctgctgcagctggtgcttctgtggctaacccaggtgtcacagttgttgatattgatggggatggtagcttcctcatgaacattcaggagctggcattgatccgcattgagaacctccctgtgaaggtgatggtgttgaacaaccaacatttgggtatggtggtgcaatgggaggataggttttacaaggcgaatagggcgcatacatacttgggcaacccggaatgtgagagcgagatatatccagattttgtgactattgctaaggggttcaatattcctgcagtccgtgtaacaaagaagagtgaagtccgtgccgccatcaagaagatgctcgagactccagggccatacttgttggatatcatcgtcccgcaccaggagcatgtgctgcctatgatcccaagtgggggcgcattcaaggacatgatcctggatggtgatggcaggactgtgtattaatctataatctgtatgttggcaaagcaccagcccggcctatgtttgacctgaatgacccataaagagtggtatgcctatgatgtttgtatgtgctctatcaataactaaggtgtcaactatgaaccatatgctcttctgttttacttgtttgatgtgcttggcatggtaatcctaattagcttcctgctgtctaggtttgtagtgtgttgttttctgtaggcatatgcatcacaagatatcatgtaagtttcttgtcctacatatcaataataagagaataaagtacttctatgcaatagctctgagttaagtgtttcaacaatttctgaacttctgaacttatgtttgctcaactgtcatcacacgaagtactctccttgtaactacattttccccaagactttaaatcccctcagttacagcaaaaaataaactttgcatctactgttttccctctcttcggtcgatcttattgggtactactatagagagaggctgcatgaagtatttcctttttctgtttagttatgccgtgtaaattagcatccatgcaaaatagatgaaaaatcaagctattcctgactgctaaggattatttttggcataatgtattcttatatactccctccgtcccatattataagggattttgagtttttgtttatactgtttgaccactcgtcttattcaaaaaattttagaattattatttattttttttgtgacttactttattatctaaagtactttaagcacaattttcgtattttatatttgcacaaattttttgaataagacgaatggtcaaacaatacaaataaaaattcaaaatcccttataatatgggacggaggtatgatagttggtgaactgctacgtattgccatttgacattttttggattatgcaattttgctgtctatagtgctctaatcaattcgcaatcccgaccttggagtattggtctcatggaacccctcatctgagtaatctccatatttgattcgcaactgagctgctgcaagcagcaagcctgcaactgggcattctaggggcgactactgttcgaccacacaaaaatccagggaaagcacaacctcttatcgatgtacatgaccaaggagataacagttgcctcatcatttaaacatgcctagacaagtagacacgtatccacacctcaagccataaaattataaattatactaccgtttatcatttttcctacatgtattagtgcctcaaataaccgtaaaaatgttaccacatcatgagggtaatttcataaacagtgctagtaaatggacaccaggacattgtaacccctgatgtaagtgtgtactacctaggccaatggaagcaatgaaaatgagaaacgaaccacgttcaaagtgaaacacagcgggcacaaaactctaccgagaacaacagcatttttaacaatacaaaggtctacgtatcattagaagcctcgttgaaagacaagtcaaggtactctgccaagctcaatcctgatggaggcttgacttggcctcggtcagatgtatccttctttgcacgcagtgattctggaagccaggacttggatccatccctgggtatcattatgttgccaacaataggttgcaaatcccgccatgggtcatcagtcatgcttttgtggtagcgaactcttccatcttgccatccagaatagttttgagtgcctgagccatcccttccccctcttccccttgatcctgggttgttgtagttgttttggcccctccctcttccataaggtgagtctggtctacctctgggtccatagttcattcggccgcctccttggccaggattatagtttctgggtccatagctaggtggatgtggataaaggccttgagatggaggagcagaatgtggattccatggtggtggaacgccagaatgtgggctccatggtggtggagcgccaggaggaggtcctcggtatcctgacatcggagcctggaactgcataggacttcgccaaggactgccccctggtgaatcatgggacaatcgggatggagtgtgaattggtggtggggccatatggtgctggtgtggaggaggataaccgcttccatagttccctgatcctgataaacaagcaaagttaggaattagatgagactgtgcattgtaataattatgagatcatatcaaattgcaattatctagcagaggcacttctaatctagcatcctatttttttactcactatcctgacactccagttctcctaaaagtaatttaaagatcaacacaaacagtaaccaaaggataaaatatatttactctaacaagagttaataattatgttctgctgtgctctaagttgataaccaatttgatggtaacccaaacatgttaccagaagtcgacaacagtatacagatgcagtgcagtgtggctaaattaaaacctacgcataatacagccgagaaattgtacaagcctttttataagaaaataactgtaataacagtgtgtagagtttgactcttaatctcaacctacattcttcactgccatggtggtttttgtttttgcggggaattttcactaccatggttgttggtagaggataaaaattagttcatttcataaacctaggaagatcaccaaaggttccctaatcaagtttctatgcccgaatcaaaatccagttaaaaggcagcattctaagttactgattaatacccattttctagtatcacctttatgttcccaggtagctgaattccagcaagttcttagatcaaatcataacaataaatttacagtgttattaagaaacccacatctaaacccggaaactttgaatcttaccaagcaaagcaagtatgctatctccagattatgtagatcaatttagatcaatgctgcagatgaatatatctaagcagtagactttctttgattaaaagcagggaaagttgtcaagttactcttatcatgtggcacaagtgaagaaaaatcgtgtatgtagagacacataaacacccgactacaaatgtggaacgcctgtatgtatacattgcatgtaacgagacaacctaaaaacaccaaaccattcccagtgccaattttcctgacataaataatgtttccttggcatgctgagatttgagttgtttttagcatgagtaaaaatagcgcatgaacttcaattaattaggatgaaatgcctaatcgaactggaatcagtgaccactatgctatccctgatggaagtggaaaccctaagaagcaaatcacatcatgtaatttatcctaagctaccttgggcgttcgcagtaaacgttggaagaagagcaattagtaagcctaagagaggaacaagtgtgtaggctacccggaggcgggggctccgcgaccttgcgcttgtgggaagcagccgacgaggaggcgaaggcggcggcggggttggtgtagtagtcgaaccgcggaggcgggcgtggggccgcggcggtggtggtggcggaggcgtccatcaggtcgcgcaccgggagatcccacgcgtccgccgcaggtggcggcggatgcggtgcggccgacggcgagggggctgctgcggcggaggagcggagcgcgaggaggcgctcccgccgctgcgccgacgactcctcctgctcgccgccctccatctaaacccgcgccgcgccgcgcctcgcctgctactgctccccctgtccctcgtcctcgtcggcggcgccgccgcttttgcgagaatccgacggcgaactcgtcggctcgagacgggggacttcgggaggccgggctaaagagctgagaagaatagttgactacgggcttgatactgtgggccgagtgccccagctaggcccacagctgaagcattcgtagttcgaaaaagtccactatgagtcccttaaattagtggcctgatctgattcaaatctcacacccgcaaaaccaaatataacggactccttcaactattaaaaccatctcactggcgtggtgtctatgtgacagcccagtcatcatcaaataacttttataaaaaataaagttaccatcccccatctctactaacctctttctccccttttcccaaatttgcatagcctacgtttttcttaggatcatatcccctattatattggatctaattattcttgaaacatgcatgatctaatatgatcacctaatttatcttatttatgcgaaattaatacgggtactcagtactcacccgcgcttgatgaagccatgagtgccgcggtagaactcgatcgcttttgagttgtagatgtagtcgtagcagaacgtcgatggtggagatgtagtcacgctgttccggcccgtctccaccaaccggcagcggcaaagcttgaataatagggagatgggagcccaatcacaatggtacaatacaacagggaaatacgactcgacgataaaaacccaatctcacctatctactctataatttaacaaatgattttactcattcatcgtgtgacacatccaacgatcgaaaatcatctgatgatgtcgatccaacggctcgccgcctccctccaaatccgatcggatcgcctcccctccccaggcaaaatcaccgtgtcctcgccagaacatcacggaccgcctcgcacaggggttcaccggcctgctgcaggcgcaaccgccgcagtttccgtggccggcggattcccttcgagatcgacctccccgtggtccccttcggcgcctcctggggtgcccgggccgggaaggagttcttccccgccgcggccgtcgcctccgtcatcgacatcggcaggaggctcggccaggctggcgtagagattggggcgtccgtggtaaatgcatcattcaagaaatggttttcaaacaggcgagcatcctgacgggatcatcccagggaccacgatgctcttcgccccgtgcttcatcagcctctgtttgaagaacaacaaagagagattggtggattagttgctaatttaccatggtctgattgtacttgcctgttcggttccaaattaaagcattttctaatctctacgccatttgttcctaatctctacgccatttccttggtagattaggaactaatctgttttaatgatgcatttgcctgttcggttccaaattagagcattttctttgtgcattttagcttatttggcaacattcatgacccgtgagggcaatatgagatatttagttctgctttgtatgacctgacctagagaagctttgtatgccatccatttttatttacatgagctaagctgtgtggattttgaagattccacaatgctttcttctgatttattaaagaaacttctccatgaacccaagttcataaatgataagttgtcagtatttaatcactttgttcctttgccacaatgggatacaattctctttaatttattagtgtaatgtgaatgatgtagtgtaaatgtttcttttttacgtgacctaagctgtgtgagttttgaagtacattcactctgtcttgtctcttcttgtacaatggtgaccacaagttacccgtgtatatcataatcaacatttttttagtacacgaagcatatagtatgagattaaacctgtgcaaaacacatctgattgtttcagattagactctattattacttcgtaatagatttatctgttatttcaaatgatcgaatgttccatgactccttatatcttttcagtttcggaacctggaatgttgtccttgcacgactaatgaattattgatgtgctcttgatttgcagaataaggggactagagagtgtttgggaggatctgctactgattggcaggatgaacagagttgttttagtttcattcccacctctgatggtatgcccttggctaaacaactagagtgtgctgctagcctattactaataggagcaatgcatttttatcttggtcatatgataggtgataacctattttctataaagaaatattgcatggaaggcactcggacagattgttttgttgggaaaaaattgctttagctgcagcctgtctgctgggagaccactgcattaccaacgtatgattgattgttttgtgttcctcagaaaaaatggctaattccatatccataagggaagatgctcttagtattggaggttttcttgcaatcggcaaacatatgaatgttacaaataaactaaaattaaattcataactttgagcaaatctccaggaaaaaatcactttaggtttctatattattataagaaatttctaaatttggggcactgtgtgaataatatcaagtttttaattatgtgtactgtatttgtcaccctaggaatatttgaggggcaatatatttgtcaagcttaagtattgaatttcaatccatgtgagaagatagtacaaatgaattgtaaacagaacataccgtcactggcttcaaggtaaacatgaatatatttctaagatgtcattttagtctacagtagatatatacactgtaactaggtatgtcgtttttatttgtgaaactcaataggtgtaactgttgctatttaaatgcagatttcaaaaacaagtataccacaaattggtgttgttaagtagttatgcagcaatactgattattatttggtttttatacaattagtgtggaatcacatcacccatgttcttttgggattattgggatcaattgtttccaatgtgcaagggctatggcatttcaaggtgctgagatattgcacaccccatgataatctgcctagacttccatgaacactggaagcgtgtcatgcaaggccatgttagtgctagctccatattgccatatgctttttttccctacaaatcatttttgaataagttgtttgaaccgatctactccaaaggaccaatggatcggtggaagagagaagcatccttttcaatttgccatactgctgagagcatttttattttcatcacaatcttgatgttatacctattatcttgcaaaataacattgtcttgaactttcaagtcagaacatgaagattgtttcgcatatagcaattttcctcagttgccagctgctagccatcagcgcatcatcaaccttgaagtgaagaataaacaaattagatggcagttgttttattttattctaaatattagaggcacctgtaatatattattaatctattggaaagatattgttgttatactcagtgaatttccaaaaaaaataaggcttagtttcttctctgttgcaatgatttatttcttgccaacatagatttcatatacattattgtactccggttacatgatctaaagtgtggtgtttatttttcatttttcaacttcaatgcaaactacaatgaagcttgatttctgtctaaaatgaaaatgtaccgtcttgtgtatgtattgagtccatgctacaaaatgttaggttcaaccaacattttgcggacaaatttcagtgattgcatattttgtgggggtatatctcactatatacgcagtgtttttcgggtgtttcatttttaatatccattttgtcgtagcgttagcacgggcatattactagtctatgatagtacacgatcgcccttaggcctatttaagtgcacgcaggcatcatataccagactagatcggtctgggactcctacccgaactcggaactcatacatgcaccaacacaaattaaaaacgcaaaggctaattaaggtataatcctaattaagataatagtgatgatgccgccaataaatcagtttggagggagactacacaaatggtatactgtcagcacaatattgttgatatcggatcttagtaacatatattatacatcgtaaatactaaatcctaatacctaaggtatcatattgatgtcagcatggtaccgtaagcagcctggcaccctcgccgcatcgctgcagtgtagagaggagaaggagaggaatagataaggttgaggagagagttaaaaggagaggaggagggaggagttaaaaggagaggaggagatacctcgatccaatcgtgcaggcctcttcgatctccgcgtcgatcttttttcccggttggtgttaccaaccgggactataaatagatctttagtcccggttggtaacaccaaccgggaaaaaagatcgctcccggttggtgttaccaaccgggactacaaatagatctttagtcccggttggtaacaccaaccggtactaaagattggaaagtacccctagagctttaaaaccgggactaaagatatttttagtcggtttttaatacaaccgggactattgtgaaatctggtcgaccgaccaaagatggtttctccaccagtggtactaaatctaatctactacgtagatatcatgctgttaacagcgaaatttgataagatatactcagatttggagatagatatcgaagctgatttgaagtagattgaatcttgccaaaacggagtacgcatcgactggaaacagagtagtactcggattgagccgatatgggaagatagccagttcgcatcggccggaaacagagtagtactcagattgagccgatatgggaagacagccgatacagcttgactcatcggctggatgttgcatcggctggaaatagagtagtactcagattgagccgatatgggaagatagcagatacaacttggctcgcgcttggttgagctgagatggaagatagttggtacaacttgacttcggctcggtgtgggcctaaattagaataactaacggtctgtttggttggagggagtttttaggagggattgggagtttagagggaagaggctattaactgttttgtttggttgggggacatgggaattttggtgggatggggatggggaattgaggaatgaactccctccttttcaatacctgggtaggggtaggtaattgggagggaattcctcctttacttcgcctaaacaaatctcagacatccgttttcattaatgatctaatctccaactaaactccctatcaatttccaccacctctaccaaacaagagactgggataaaaaatcaaattcccatcttaatctcaccatcaattctctcgtgtaaactcctaatccccttccctcaagttgccaaacaagccgtaagtattgtcgtatagggatagagcccatctagggcaattgtatctgctaattacaatattaatgtcagtttgaattagaaatatggtaagagtccatcatgtgggcttttgtttttttaggaaagttcgaaacgtgtccataattgacaagttttctactatgggtataaatataaacccaagatcattgtaaaacgggaagaacatccaatcaatacaactttcggcgcatcgccaccttttccttttaagttttttatgggttcttgcttcaagtcgaggtgatataaaaactaaatagcacttaaacaaaactaacctaagttgttaggctcggtgaggaacaagtctaactaagcaactaatttatgttttgcaatcctagggtgatagtggctcaagtatatctctaggaaagaaaatcgcacacctaaattatgttttgcaatcctagggtgatatgagctcaaatatgtatctacaaatgtaaatgcaataaataaatgagacaagagacaaggagtatttcaccgaggttcgaaaactcgccggtttcctaatccccgtagaggcgagcccaactccaccgctcaaccacgaagccaccgcacgcctccttcgtcaaggggtgggcaaggcagcagccggcccacggagaggactacccaagcctcgatcactaggggtagttcttcctttactccgaaggtggtgaactccaaaccactcacaaaccgacgtcaggcctcctccacagtctcctcggagaggtcaccgggcaacacctccacaagtcgtcttggaggcggcaacctccaagagtaataagtgatgacccgtctcggagatgatcaagtgccgcactagctctacaatggaagcaatgcacttgactcttggctagaacaaccctcaaacacactagatggatgaacacaaagcttaagtgagtgtgtgagaggtgcaaggggtgtatacaattgaattgggtgccaagagagtccccttgctgctggtgggggagtatttatactctcacccaccaaaactagccgttgggggcgaaatcccccaactctgtgtattgccagtcagaccggcggtgtgtggccggttagaccgtgctactttgcgacggctagaaaactagtcgttataggcaataatttgaacctatcattgggggccggtcagaccggagtgtagtggccagtcagaccggcaagggctcggtcagaccgctaccggctcggtctgatcgattacggctccagcggctcgggttttccacccaaggagcacccaacatggccactgccgaaataccctaggccggtcagactagggtacacccaccggtcagaccgaccgacctatgccggtcagaccgcctttaggggcccggtcaggccggccctggtcacccagtgcagacacaggtaaatgaaagtgtgagcaagtttaaatgcaaatgacctaatgtggcattttgataatctctttgttaggtcgttacccctcttaatagtacgtcgaagctaaaaataaactagcaaatttgattacccaaactcctcgatcaattttaaaatgaaaacactagtttaccgtcttcttttccttttgctttgcgacgtcaattttaacccttcggtaatcatccatgcgcacacaataagtgaacctaacttaaaataaatatctcaaagataacagttagtccacaattagtgcttatcattaattactaaaattaacaacggtggcctagatgattcaacgagtacatctacaactgtattaatttaggcccgattgagatgacttcgttctgacggctcacgttgcccagacatgtgaggggccgtcacagatgagaggatctgcactagtgagctctactacaaaacttgctcttagggatagttaagcatttgtttcttgtgcatatggggagttaaagtccgcattcttcttgattatatatatccgtcacatactaacattaaataaaatacatgatacttaagtctttcttatttttgaggaaaaaacttatatgacgattaatatggaatggagggagtagttagctttacttattggatttttttatatacatttcatcgattcttgaacattttaaatgcgcaacaatgcatgctccaaaatcttatgcaaatttgtgccgtaatgatcgaacaacatcctctgttcatgtgcagcgtcacgttactgtactgtacatcagtacatgcctgccgattatttgccctaatctttttgtgatcatgcatgcatggggctaatcagtggttagactgatcggtagcgattaaactaatcaaatcccaacatcctcagtgtcagaagctaatagcctcgaaatcttacacactactccaccattgatttaatttaatttggaacttacggagtagatcctagctagaacttgagtaaatgtgccgttatatatgcgtacaacgaaaatgtgtgattaacattcatgtgatactcctggtcgggttagtgccattttagcttggctatagcaaaagttctgcctaaatactacttcgtactccacgtagtatacgatatcaaaacagcacgtaaagtagcacaactttaacaaacaccacttttcattcttgacgcaaaattcatcaccttgaaattactagctgaagttgaaatcatcagaatggccttacctaattatgcatccatgagttccttttgttcttgtaacttctaagcataatcacactagtaacattgtacttagaatatagacatcatgcatatcctggccctaccttatcacattgctattgtcagttccactgaaacagccatgtggccacacatttgctagtacgtaccaagtaccgatctaggtagtattattactacttggcaataatattgaaaattttcccggataatgagaagtacatatatccattacgccgtagtattatattagttcaagtactgtatgcacattatccggagtttctattcagtgttccttaagggatttctttggttctttctttttttaattagtacacctattaattggaaagtgatacacgtgaaaaaaaattataaaccctttacaaggactgatgtggcaagctgtgattgcatcaagactagctcttcgcaaatcataactaccaactgattaataaatcaaacagagttctttgaatgtaagagctccataagaaaattttagtgtttgttttcatcctagaggttcctgaaccggtttctgtaaaagaaaacggaattgctaaacttctgtcgatagaaaatagaatcttaaatcttgcaaactttggatcactcgatgtgctttatgattcgtgctcttcttcttcaactccggcaaccacctcttcttctccggcgcggacgaacccaaactccggcagagggccgacgaattagggtcccaggatggggtgggggtgggaggggggagggggaggaggaagaggggggagttcgctggctttaaagggatggctgtgggaggcggatcgggcgggcagcgaggcggcggcgccgccgccgaagccacggggtcgagagcggggcggtggccggtgtaggcggtgcgagcaaagcagatggattattaggaggagaaggccggtggtggcgccccgccgttggagacggagaagaagatggcgcgggacaactcgcttgaggaaaaggagaggagagggaggggggagggtgagggggggcgagggctcgccggcgccgttaacgcctttcagccagctggtgaggcagggcggcggcgcggtggagcagtggcggtggaatggccgatgggagggagcggtggcggtggaatgagcgaggggaggggaacgagaggaagagttaaggttaatacctctgcacgaatcttaaagcatattcgatggtctaaagtttaaaagacgggatgcgggattttttatcaacaaatatatagacagtcccaaaagaaaaactaaaccaactgagatcatctctataagaattgatgtgggcatactatgatgatgccattttcaaccttaccaaattttggtgaagttaccaaaaaagtggctacatttagtttgctgctaaattttggtaactatataagaaatcctgcaaaaattttggcaagttgccaaaattttgctaactatgccaaaattttggcaatgccaaaatttggtaaggtttttttttggcaacaaagtaaacaggcccataattttattttgcttttttttatataataaaacgagtgagatctttggttgcaagtgttcaaaaaatattttaaatacgtatagcactgctcctgctttttcgttttacggtagtagatgtttctgttctgaaccggtttctgaaaaagaaaagctgaaccttcaacacacgcaatgcatcagaagttgcagcgagaaaatttggccaagacattcctgcccatacgcccataccgaaatactcctaccatatgatgatgtatcgtatcgtatcgtatcatgtaggagtgcactggtatggcaacgacagcagagctcctctgcagtggcaaaacacacggcatcccaacaaaagaaacagtggacggtgacctttatacggagtaccatcgagactgtaacaaaaggagtagtaaatcacacattaactcctcgaaggacgcaacggcgtcgtctttggtgaggctcagccgaccttgccgtcacacattaactgttcgctcagacaagcgagtagtagtagtataatctgttttttgcttttttgcccttttcacggtttttcctgatctttctgggctttctccccgtacatctctatccgcttcacgctcggacgagtcgatttgtgtaaagtttatatcgtcctcagaaatttcttgatgaacgacgaacagaaatgaatatggtaagcgaaaattgagtgaaaaaacatcactaatttttttgaaccaacactatatcatacacctagtcacctactcctatgtagtataaaaaatcaagatactgcaacgtttgtcagaaagaaaaaaaatattttcctgacatgtcctccccacaaaaatgttgtcgccaaaatctgaaatgagagggggaaaaaaaacagatataggagatgatggagacaagcgtgattagttccaaattccaaggcattttctgagagataaacccgcaccgtccgtctccgtctccgtcctctctcgcttccgtactactccactagtgtcactcgcagccaaccaaccagcgtttttacctccacagcttcaacttcaaagggcgcaaagaacgcaacaaggaccagagccagagtgagccaccaccagaggcgtgaccgaatcggctagcgagtgagagaggaggagcagttcacagttgcagttccacgctcgcagtagtgtccagagcagagcgcgagggaagagggcgcagagagcaggaggagaggcaggcagccatgggcgaggtatggtctctctttccgttcttggtaatgtgcgggggcgcgtgcgcgcggctccctgtggccgaggaaggcggcggcgccacgcctacctttgatgcgcttcccgtttcttgcgtgcaggaggagaaggtgaaggaggaggcggcggcggagaaggggaaggaggcggcggtagcggaggagaaggaggcggcggcggcaggggaggagaagaaggaggacgcgccgccgccgccgccaccgccggaggaggtggtgatgcgggtcttcatgcactgcgaagggtgcgctcgcaaggtcaagaagatactcaggggatttgatggtaatggagaaagcctcttctcttcttctttttctgtttatctctagctttcttcttgttttctggccttgttcttcacttcttgtgctactgtgtaatgtttttccctttggttcagagttcagactttacagggtttacacttaacttgataataaaatgtggtactacctagtagtttttatacttcagataactatttttttagcatattatattggcatgttaagtgtggtctcctagtttatcagtttggtgccagttttggacttctggttcccatcttgtttgtattttgtggaggaagagtacttcattgcttcgttctcgacatgttcttttacctcgttaaactttagggttaagtgatggcttatgtttttttttaaacggcaaacaatttagtcatttgaagtattggggtaagtgtttgttaagtacattttatttgcttctttgtaacgtaagtttagtgcctccttcagaaacttttttgagttcgaattggcaagttttgttttgtggtgtgctatttttctttgaagggttattcaaaactgttattgcaacatccggcagcaattgaagaggtttgaaatcattcagattcgcttaattagacctttctttcaagattttccacgtgcatttactgttaatgatggggaaaacaactcctgatgcagataactttttactcggaagataataggatagctcgagtgccataaagatgaatcgcaactgctatatgttgatgctcttcaaaaaagtttagattatctttgaatgttgaatgaaaagacatacataacacatttaaaacttccaagttctgtactagcactcagtgactccgatcacaaggcacacacttattttgcagagatcaaaattgttatgattcttggtattttggttcagttgttgtagttaggcatgagccaacgaaaactaaaaaaaaatgggatgcaggagtggaagatgttgtcgcggactcgaaagctcacaaggtgatcgtgaagggaaagaaggctgctgctgacccaatgaaggtggtgcaccgtgtgcagaagaagacaggccgcaaggttgagcttctatcaccgatgccacctccggtggaggagaagaaggaagaggagaaaaaggaagagcccgagccaccaaaacctgaagagaaggaggtgaattattcttccgaaaagttcatctagtcactcatccatactgacatcaacatatcacctacttgggctagcttccatcatttcgcttgcgttgtgtacaatgttgttgtttgtgcgattttgacactgagatcttgatgtcttgttttgttcattagccaacggtgatagcggtggtcctgaaggtgcatatgcattgtgaggcctgtgcgcaagttatcaggaagaaaatcctcaagatgaaaggtacatgatttgttgctatctcccttctgttttattgcaaatacatatgttatgttggtacactgaatctgttttttttttctgtgtatgaagtttgtatttctgcacagtgaatacatattcgtgggttgctttgatcaaagagaatagctatcttttaaatttgatcttcttattcacagatgagattgaaattttttgcctgatactagacctgcccatttcccctgtcttgggtgtttcagtttgcctgaccataatggtgagaattggccaattgggagtggacaattattatgaattgttactctaggcacactactttaactaaccttatttagtttaagaacataaactttcaaagaacaatatactactttcttagtaatacaacacagttgtatttcataagttatttgatagttcttttatatcgaaggatccatgtcctgttcgtttccactactagcagtggatgaaattttggattttcgtggcacgcttttcaaaccgctaaacggtgtctttcgtgcgaaaaatttctatatgaaagttgttctaaaatatcagattaattcatttttcaagtttgtaataattaaaactcaattaatcacacgttattaccacatcgttttgcgtgaaacacttaatcttcatcttcatcttcaggagattcaaacaccagtcatttactacttcaggacccactgagtaatctctctctctctttttgtaggagtgcaatcagcagagccagacatgaaggcatcacaagtgacggtgaagggtgtgtttgaggagtcaaagctcaccgattacgtgcataaacgcattggtaagaatgccgccgttgtaaaatctgaaccagcccctccccctgagaatgctggcgatgcaaatgcaaaggatgacaagaaggcggccgaaggtggcgaggagaaggacgagagcaaggaggaaaagaaggaaggtgatgatgagaaagaaaaggagaaagagaaggatgatagcaatgctgccgaggttgaagagaaggacaaagagaaagatccttcagccttggctgctgctaatctgtatatgcattacccaagattcagcaaccctggtggatatggtgttcctggctacgcatacccgtatgcgccgcagctcttcagtgacgagaatccaaacgcctgtgttgtgatgtgagaaggtgagaacaatgaggtccaaattgggggaaataagagtgagactacgcatcccctaacttctggggggtgaaatcggctgttcgaagataggatcaagcaagccattttggtttctaactgttctcatgtaattaaaatgtgaactgttggcctcgtctctattgtcggccttcatggacattatattatgtaagctaaaaatgtaggattttgctttgagctttctctctattggctttccttttgtaaaaattgtataatatatatattgttagtgttgaaatagcttgtgtatccttgttattgtctcaggaggagcaccctctagtcattattgctagagctgtgaggagcatttttattatgattatgacttcattgaaggggcttaaatcttagtgcctatcttatcttatcctataatacgaattcaacgcaaacaatcgaaaggagaatcatgccacgtggcaccaccagtttcgcggaaggggcttaacgaaacgatcttgcgtccgcgcgtgcagggatcgatgaaacactcttgcgtgcgtgcgtgcatgcaccgggcctccagaaatttctcggcaatcaaactccaatgggccacggctcgatagcccgtgcgaattgtgccgtgtgatggcacaagaacatgctgggtgacgattctagagagaaccggcgccattgtgtggatgagacgagatactatgcatacatgtagtgcaaacagccgatgcatactgatcgattcatgaactacgttgctggctttgatttctcacgttgccgccgtacgtctagcaaagctcatgcaggaaggcaggcagctattgcttcctttcatcacccgatcttgaggatcaaagaagtaataatacctttagttaggaattaaaataggattagcaggatgtaattaaatcatccactaaaaattcctacgttccaagcatccattttttaaactttctatgttttttattccactgtttaacacccgtatttatgcattttatattccaaatgttttctttcatgtattttgtttacttgagttccaaacctgcctatgtttgagaggagagggaaaaatgagatatgtaaaatgaggtgacctattatcgcatgattaattgaatattaaatatttcaaacatggaaaatatagaaatatgattattttaaaagtaacttttctacaatttttttatgtaaaaaacacgccgggtgaaaaaaatgatggatgtttctccctttatcgaatacagccttagaacaaagtacaatataaagcaaataagctagctatagaagaacaaaggagagagaagaaaagtggactacatattagttaattgtaatatgagctccaaaatagtacgtgagaagtaaccacccctcataaaatgggtaatctcttcacaaactccaagaaaagaatggtgttgattggatgcaaattggagccatatgttacataaagtttattacatatgctacatcttaattaattagttgatcatgtgaataaattagtggtcgtaatcacccctgccataaaagctgctcataaaatttgctcttagaggaaagataatagtgggccataaacttaggtggaggatagagataaaaaaaatatatagtgttggctttcgagcaaaatataactttacacatgcttcaaggtaaatacattaaattcttataagtgagataaagagaggaaaaagaaatagagacaatcttatagccaacttataagctctaaaatggcttcctgggttctgatcaacaatttaattttgcaaatagtgactacaaatatgacttagacttttaaaaaacaaagaatggaataaggtcctctttgtttaggtttataagccgaaaagtctaagcctaaacaaacaagcagcttattcgtttggcttttttgaagccataagccactctaacactattaaggcaaaatctaggttggagaagtttttttgacttatgtgaggtgaatgtatgactccaccactaaacttagaacattaaatccacctgcttataaatcatataaactaataagctgacttaaaagtctaagccaataaatataagcctaaataaaaagtgcttataagtcttagaattttgaaagagggagtattaatctggctcttcaatatatacgtattaatttgttacctgttcactaagccaatgggccaggctcattgtaacacgcgtggcaaagccacgcgctctttctattaattacatatacttgggattgttttcaatcagattttagtgcggttactaaggctgtgtttagatccaaagtttggatccaaacttcagtccttttccatcacattaacctgtcatacacacaacttttcaatcacatcatctccaatttcaaccaaaatccaaactttgcgctgaactaaacacagaattaaccattgccatgtgtctcttgaactgtttttttttggggggggggaccaccacatgtgtggggtgcatttgcgtgtatatagagaaaatatgtaatgtaaacccatatagtgaaaacatataaactattgttgattaaaaataggcaaattagatttgtcccgtcactaggaataaaaattttactctcaactttaattattagtaaaatcaaatatgcctcatccattgccccaccttattcaaagtagggggaaaaggtagttttatttggattctatctggttgtgagtctctatcagcctaatttgagtatagatttatcattaatctttatctttttaaacgtgtgaataagaaagtctactcgtggatatgtaaatgtgttgtgttgtaaacttgtaatgtgtcgggtgcagggtccacttcatcggtttagcccatttgaccggaggtcaccaaaatcccgaaattttaaaatttttcggtcaaagtaatattatgaaaatttaaataaatattattaaaatttatgaaaaaatattgaaaaatttcggtcaaataatatcgtatcggaaggaccgaaatgaccgaaatttgcgtgcatcaatcgcagggaaagtcacggtgcgcatgcgctaccgtgggtcgtaggacggtccgacttttgccgtagatgcgcgctctgctgccgtgacggggagagagatcgccgcgcgccgcgttgtcagatgcgcgatctgtactacatgcatgtactgtgcgtacctacctacctggccgtgcgcgcatggtgatcgacaaacacacgacacgatcgcgggcatgggagtaactgcgcgtgcacgcgcgcgcgtgatggatgcactagtgacttgactctgcttgccgtgcaaaacaatgcgactctcgtgattcccattgctctactgcgcacttgaatgtgtgtgtacatggacgacgtcgatcgtcctacagcctactacaggtccggctttgctgaacagggtttcaattaagaacctttaatttctactgtgtcgggcctaccagcctgcccaagatgccttttataggacaaaaaacgtgcatgagttttaccaaaaagaaaaaaaaaagaaaaagaaacaacgtgtttcccttttgaattcataattggtttacttatattggctatcgttgaggtccgattattggtctagcaatttcatatatcaaacggtacgatacaaattaatacacatcacaaaataggtctagatagtagttttttaatattttatttgttgagatgaggtctagacacttgataatctaaaataaaatgcaaatggacatgagggcaaagccaatatttaaagctcatacacatttcaaaatcttttttttgcggggtagacacttttgataatctaaaataaaatgcaaatggacatgagggcaaagccgatatttaaagctcatacatattttaaaatgagacccataaatagttagattttgttgtgatttgctacacaatgtttatggctttagtatgttgcaatatatgctcactacaaaataaaatatgaggtgagataaaagctgccagctcctttgaatgatggtaggatagataaaagctaaggataacaaggggatatctcatggatggattagagaaaatgatagatcaactataaggtgaaatcatcattactcaagtgtgtatgttgatgacggcttaatagaaacatttggaacatatgaggataattttgtcattttgttggaaaactaacaaggtccaaaacagtttgacctcgatagtggcatataaaagatagtaaaagtttttgttggatggcatataggaaatagtaactttccagtggcatataagaaaactcgcaaactttgagtggcttataaaatttttctcattatttatataaaatggagtgaacttgcatagcgtatacatgacgccctgtgatcacaaaaacaaatcatgcatcctctcacgtttctagtcaaaccttcttgttaggcgatgattaattaattattctagtcaaattttttagaacctattatctccatatatgtttttaaatgtgtatttattgtcgaatgtcacagtgtgctagtactacataaacttgtgttcaaaaggtactatattctgtattcaaatgatgtgttcttagttcttactacaagctagaagagagagggagtaactaaaatcacaggttagcatgggaccgaaccaaccagaaacccagatccccctgtctctcttctccaacatgcatgtatgcacgccgtctgcctctgcctcgctgtgatctctgcgactccgctctggaaatctgaatacgagcgccctctgatccgtcgtcctcgtctttagtacgttccaaaggcgaagcgcagcccactgctacctactgtccgcctgtccgctgtcactacagtcgcagctggttggctggctggtaaatccagcgagcaaacagggaagagaggccagcatagaggaattgaaggaccaaagacgccatggccaaatggatcctatgatgtaaacggtgtaggactctactggcaaatgtatatgttgatatgcatatgtgcacagcatgatgcgctcgtgtggccctctctctgccactgatggtgagtcgagagagcactgtgcactgtgcactgtgcttgttggtggtggtgccaccagctacggagaatagtaacattcgcaatttctttgttcactttctattctcaatcaatcgttacttttttctaatcattctcagcaactttctttatactcgtgtaaatctcaaaatacttaggacgcttttgattcaaaagaattttcgaggattttgttcctattagaattttttttacatggtcctttgaatcaatgagtagacacaattgaatcttataaaatttctatggaatatctcatatcatgtaagttttggaggaaatctaacttgatatagagtctcatgtcatgggaacttttctttaagtctttatctctcctttaatttctgtttttcttacggttcagttatatggtcatttctatattttcatgtgtttttgtaatcttttttttacacttacattcatgttaaagttctactccctccatttcacaatgtaaaactttcttacattgccccacatatatatgtctagattcattaacatctaaatgaatgtggataatgctagaaagtcttacattgtgaaacggaggaagtatatttttattattctatattttctcaatcatacgttttaaagaggtccttatattttgtaaaggaggtaataccaattagcagcaggggtcccttcatttttgctgagagttgactttccccgctgccaaactcctttatagtatctcacgttgttttaagggctcagtgtcaatgtgtctttgatgcaacaactaagttatccatgatctttggaaaaagtttcagggcctgtgttgaaccagaaaacaatcatgagataaaaaggagcttattagagcacccgcaatggtaaagtaaggtgttatctataaaatatgtacatctcagcaatagactagattaatagtaaaccacttcaatggtaagtctacatgggtatctatagctctctaatcctttgtctcgtttttctctatagactatctccaagttagtagatagctttgttctctctcttcatttaatctattccaagtaggaaaatatgctgacatggatctcttgtagagagcctatagataaccattatgggtgcccttatggctcattgccgcacgacaagagttgaaaataccaccacattctggatattgcattatgtcgtatgcattatggtgggtttcatcctgctttgaaaacaaatcctagatccaaccctggttctttaaggttggtattccaataatgaacgctttgtctatctatatctatatctatataatactaattataaaaattaaagatatttttgttggtactttgacacgtcatccgtgtatgagtcgtttttaagttcgttcgcttttgaaaatacatatccgtattggagtcagtttttaagttgtttgcttttggaaatacaaaaggagtcggataagaaatctctttaaaaaaactcgcatgctaacttgagatgattggactcataactgcagctcataattttctaaaaaaatatatatccaaacaaatttctacaataaatttcatcttaactaaaccgtataataacaataagattaaaataaacttcacccgttgcaacgcacgggtattttttcgtagaacttaacaaaagctcttacggtcagttgccaatggtgccgtcactcgagaagtagccagcaacaaattatcccacgaaaacaactcagaacaggcagcggtccagcgggggctgcaccaagatgtgttgggtcatcatcactcatgagtgccactcgacgaaaacctgccctccccccagcgatcaaaactgtcgatgtagaactaacaaaacccgccaacgaaactagccgagacggccaagccagctaccccgggtggtggaccgctcctacgacagcgagtcagcgacagggcgacctgtacaaccggtgagagcgccccagttggaccaccccaccctgcgcccccctgccccgtcctgcgccgcgcgcgtacgtacgcacgtactcctacgtagtgtacgtactagagccgcgtgagatcgccaaagattcacctgccggtctcgtacgcgcgcacgcgcacgaacgtatgcgcttgcgcgctcgccgtgtggggaggctgggagctcgtcgatctcagtctcgtgaacccgagtcaagtcgatcgaacaggtgatacacgcgcgcgaacgcttgagaggccgagacgaccaccgatggataggtgtgggttcaaaaaaaaaaaaaacgaaccgaaaagaccgagaccgagaaatttggtcatcaattcagccctaggtagcgaaagactgaattttgttcggtcaattcggttagtcttctcgggtgaccaaatagaccgaaaagaccgaattatcaaaaaaagtctaaatacaacctacaatccactatgtttaataggattaaactctaatttttacatcctacttcttctaggcatgcaacctaataagagtctttacttataagtgcttacgaatttttttatgatttttgtgttgaaaatttctattattttttgcatatatgaaaatgttgttgaatttcggttaggaccgggaccgagaccgaatttgtcaggatatttgtcagtcctgacatttttttcactgaaattcggtcttcacttttaaaaaaccgaaagatcaaaaaccgagactaaaattttcggttagactggaaacccacccctagccgatggatgatgggtggtacgcgccgcgaaaccaaggcgcatcacatgtacactcgcgtggccggtttggtggggtggtggcgaatggcgattcggcagtgcggcactggtactaagaggcaacgccgcgcgttcgttgggcgggtactggtagtggtccgtctgccgagaggaagaaacacaccagatttgtggaggtctctcaaggggggattattttcagtttttacatgggcctcgttactgcctaggaccaacggtttgatggggaaactacatacgggtgatggattgatggacggacggacgccatccatcaacgaaattactgtaggcacaggggtgattgattctgtgtgagtgcatgcgtacggtcgaaattcgcgtgcaccattccgtggcaggctaagccactgctaacctccgtcctaaaatgtactttatcctaaaataacataaatctaccttttacctacctcctctcaaccaatcacaatattctctttcatctactttttttttttctcaaccaatcacacacttcttttaatcatttccacgtactttcttaatgtctgtgttaaccaaaaaaatgcttatattttggcacggagagagtcatatggtactagcgggtcctaaaattctgttaacagtaaaatttggtaagcccggagtagtcatcggcttcgaagtcctgagattagccgatgagagttgtcaagtcttcagttgtcggattcttgctatattcggttaaggaaaattgatctatcagaggaagcttatctagaagagaccgagttcaaagagaatgcgacatggcaagttatgtattaattaggaataatttgttagtttccttttatctttaggaaaatatgtttagtgtcctataaggactttatcttttccttttatctttaggaaagtttctttcgtgtccgacaaggacttgtatcaacccatgcgtacaaatatgtacacccggggtctatgtaatctatcttcacgatcaatacaattcggcgcatcgccaccccttttaccttttctactttattttatcatccggcgggacttggcacctgacgcggggttgcatcggtgttcgatctccggcgaaggggtaagtccaatgttccgtcggcctaggcaattgtatcgtctacgtcggcgtcgttcaaggctgcatcagtacattcgacctcttggattgctctggtttagatgatatacttgcctacctatttatcatatgtctatgttaatctagtcttagcatatcaatttagctctatcggctgcttctcattttagggtttctgccggtatcggctaaatcgcgttgctaaattagattagcttagacatctaccaccctgaaaactcagtcaatggcttgattgtctggatattatgtttcttttcatacttagtgctgcatcagttaagtttgatctactaagttgtgcttagaaccataatctctagcctgcttcttgattgccaataagggtttcatcggggtttcagccaatgagttatctggacattgcatcggctcataaggattgcatatacatataaataggatttagccgatgacaacaaaggtttcactgttcaatctaatcttgtggatttcatgacatcggacctccagccgatgtgtgctttaaccttcggatcgatgcttatttatcatatcaatgctagccgattggtttatactgaattatattgttgctatattctatcatcatcagccgatcgcctttatatcattatctacattggacatatagccgattgcttaaaccctatctctatcggctattatcggctatcggctggaaccactccatcggcttgtcagccgatcggctgtttatatgatgtttacatatcttgtcagttacagggtcaaattgactggcacacccgcatctcatcatatttgaacctgcacaggagctaagcagatctcccaggccgatgtgttcgattttttcgtcaacaaattcttagtaggcacatggatgcacaggagtattctacaataaatcctagaattcaacattcaaaattatcacattatcatccatcaacaaatattatatcttaaacatcatgcaagtattatctataattttattccttatcttttgactaaaacatgcttgccccagttccaataaaaggactgtgttctttcgagagggttactacttatcctcagctcgcataatgaagtagtagtagattagtgcacgattaattaagtattagcttagcaaaacaagggaaattgattaatataacttttgaaagtgatatttctatagaaatttttttaaaaacacatcgttagccgtttaagaaacttgcgcgcggaaaacataaaggtaaaagttggaaatatgtagtatagaacccacctttaaggatgttcaaattcatttcaaaataagggtcaaaatcacgtcaagctcccgtatccatccttgctagttgaatattgttgtcaatacaagactagttcgaatgtaagggttcgaaactcccctctcccccgcgcacgcaaaacgaaatgacttattactacataattaattaaatattagctaaaaagcttgaaaaataaactaatataattttttaaagtaactttgctatagaaactcttttgtaaaaaagacgtcgtttagccgtttcagtgtgcgcatgaaaaataaaagggcaaaagttgggacttgcccaaacaaacgcacccctagtccgtgttctttagatggtttgggaagctaatctctcacacacacaaaacggaacatcccattagcacatattaattaagtattagtaacttttttacaaatggattaatatgatttttaaagcaatttttcgatagaaaatttttgtaaaaaattcatcgtttagtagttcgataagcgtgcgcgtgaaaaacgagagatgtgggtcgaaaaagtaggggaaagaacatagccttagcatagaaaacgaagaggtttattagcacgtgattaattaagtattagctaatttttttttcaaaaaggatcaatatgattttttttaacaactttcctaaaaaactttttgcaaaaaaacatcatttagcagtttaaaaagcatgcatgcggaacacgagggaaaggagttgggaacatgcggtgtggaacacaagagggagtggtgtagcaaactgtgttcttcatgggatgattggagaaaacatttgggcaaacatatagatgatggaggtgagttatagtataaccttatgtggaggagagatgtaacaaaaagttaacggtgttggctctcatgcaagagttagcttaacacaagctccaagacaaatacaattaatgtataagtgagagatagagagaggagaaaaaaattgtagccgaccttatagctaatctattatatgtgttggctttaagattggctaatagtaggaagtgagctctgttattatccttgctctgataggaatagtttttttttctagaaaataataaagtttcaaataatttgtggtagagactagacacaattgtttcgtgataactggtaccatttaaattttaatggtatacatataatgttctctttgaatatatataagctaaggcttattattcgacaaaacctaaaaaatatgaaatatataaaaaatatggaaaaatatatggaatacaatttatatgcatgtttatagggtaataaatggaattctatatgctatcaaatttgtttttattttttattattatctggatgcgtaaaaagacgaggtccacatgcttttttttcaagaactacattggtccttagttgttggtaatatgtatatgcaatactactctacgctggtaattttcgatattttttttttactaattgagtgacgtacaaagtgtgggtctatatgtttttttattcgaaagtcctaaggggcgatcgatcgctccaagcgatcagtccccctccccacatcgatcacccccttctccatgtggtttcctattttggaaccacattactttcctattttagtaaatttgtacacctcaagtttacacatctaaagtttgtacacttaaagtttagagactcaaagtttacaagccaaaagtttctatacccgattcaaatttgaatttgaattcaaatactatatatatatagtatttctatacatttaaagtttatacatctaaagtttagagacccaaagtttataagtcaatagtttatatatccgattcaaatttgaatttgaatttaatttttttatatatagtatttctatacatctaaagtttatatacctaaagtttatagacccaaagtttataagtcaaaagtttatattgtagtatcaaatcacaagaactaagccaaccagagggggttgaatggttgatatacccaaaaaccaaaacttttagcggaaataaaagttaccctcgaaatcgatggatcgcggtctgaccgaagtagttgcgctggtctgactgcctgatgaacgtcggtctgaccgatgtagatcgatcggtcgaaccgccgagaacgcctgccgccgactcctgtcgccgccggtctgaccaccgtgtgcccgcctgtcggaccgccgcgatgccgccggtctgaccgccggtgcgccgccggttagaccgccgaaacccggtgaaacacaaatcgaagaattcttaaagtagatgacgactttattacttctctctgtgtttacaaagtgcaccaacagcactccttacaaaaattttaactaaactcgaaaccctaactcaaaactcaactcaattgctctctaaagcgatacaaaagcgataccgggaagcctcacgctccccatctatttatatatgaggtaggcagcctaaagccacgaaccaaactcatactaagaattctaaacaccttaggaaaccctctagtacaagacacaaactttacataaccaatcgtaccaaatttggattccttccaaattcgactccgcatcccatacgcacacaatacctccatcgtatgtcatatggaatcttcaccaaccacgtgcatcaactctagccttagtgtcccgcatgatatctgaccactacggatatcgtcttaccaccaagccgactcccggtccatcaccgcaaatactctcccgaggcatcgagtcacctacacatgaaacaaacaaataaaccatattccgagaccaagctatccccaacttgactcattgttagcaaacaacagtattacatacgtatagtatccacctagaagtcataaccatgaaacaatcacggatatccaaagaaacaacccgaaaccgaaaccgacacagcgtcggccggtcagaccgcgggcgggccggtctgaccacacacatagcaccggtctgaccggcaaccaccgctcggtctgaccggtcccgacaaaacagtaaaccctgttcatcacctgaaaatcaattatttccaaaaccacttcgacattaatctccaaatatcaaaaccaataattacatatgccaattgttcatcacagaataagaatcaaaacacacgttgatcttacatatatatctgattcaaattgaaatttaaatttgaatttgaatttttttatatatagtatttctatatcctattcaaatttgtttttttatttttttaaagatatggtgtagtaggaagagaaaaaggggaggagaaagagcgagaggagtgtgttagggaggggatggggatcgatcgctccaagcgagcggtggcacattagcaccgcccttgcaaatatatatatgggtattaatttaatcacgagaagtatagttgctttgtttatttccatgacgggccagttttgatgtggaccttttctctttttctttttcttttttttttgtgagaaatgtgcagatctgtagaataggcccaaacagctgaacagtagtgggccttagtttgctctatgacctgaacaggctacagtaaccctgtacaaggataactgattccatgaacggcataagttcactacaggtccctccatttgttgcctagtctgaatctcgtcctcggtccggaacaaggtctctcggcagcattgaccctagttttggctgacgtggcatctacgtggctcctttgaccaggacccacatagcactaacgcagcgtttacgtggcagtttgatccgaaaaaaataaaggagcaaaattaaaaacaaaagaaaataaacaaaatatgcgggacccacccataagtcgtaaaaaacaaaaaatagtgtgacccacacgtctgtggttcctaccttttccaccacatctcttcaccggatgagagagggagaggcaggaaggctggccacgcggcgctcctctcgcccgccagccgccacgcggcgctcctccctctcaccagctaccgcgcgccactcttctccaccgccgccgctcctctctcccgccaccgcgcggcgctcctctcgcccgccggccgccgcacgccgctcctcccttccgccggccaccgctagcccctcttctcccgcaggccaccacacgacgctcctcaccccggcgcgaagtagtaggtggaaactatggcatccggccgcgggagacggagaaaagggcgtggatcctccctggtggtgatgagggcgtggatctcgcccctaacagccaggcggaagccgagcgagtggagctcccgcttggtgaggcacccgtcgcgtttgagctgccgcagctggttgccgcgcagccatgcgcggccgcggtcggccgtagcggaggccttcccctccccctcctccttctccttcccatcgacaacgtcatcgtcgccgtcggccttctcgcgcagcacggcgtggtggcggggaagaacaggggtgcacagtggccgccgggagagtggagttctgcgtggcgcggcacagtagcgggggagaagaggggtacacggtggccggcgggcgaggggaacgctgcgcggctggcctccccgcctctccctctctgctatcctgtgaagagatgtgggtggaaaaggtgggacctactgacatgtgggttccactatttttattttttgtttgactgatagttgggtcctgcatattttatttaatttttttagttttcaattttgctcctttatttttttggatcaaactgccatgtacacactacgtcaatgtcacatgggacgcagacctagtcaaagaagtcatgtagatgtcacgttaactaaaatcggggtcaattattccaagagacctcatttgcactagttttgtaagttggaggctgtgttctatctggtttttcggactgggcgacaaattgagggacctagagtgtacttattccttccatgaactcatcctcagaacattgaatcaatgaaacatttgagacattttgaataagtccactttgattccctcaaagcaggtcaaatctatttcgtgtccatcaaccacaatacccgatatattgaccccgactattaaaaccggtgtaatttgactccctcgacagtattggacagtggtttcgctggcgtggcttgttgacctgatcctatcggctgagtcaccatgcgggacccatgtgtcaacgaccactctcttactcggtttcccaaaccggcggcgaaacccccatcctccgcgagctctccgagcgggacagcaatcggtgacagcacaatgacgatggcgaaggaagccactcctcctcctcccttgctctagtccccatgtaagcgagctgaccaagaaaccaacccgcgccgccattagcaaggtcatcgtctgctcggttcttggctgagctctcatggcataggggaggccggcgatgacgtgtagagggcgcctgggaaggcacagcgcggaacgacaatgagcttctccttcccaggcgcgctctacacgtcatcgccggcctcccctatgccatgagagctcagccaagaaccgagcagacctttcaaatatgcatttaatgcgcaagatatcataaagtctagaattcagcctcaaccccttgcagaacagacttcatctttcgccacaccccaaccaaaagagaaactctaatctgcaattcattcttctgggtacaatgaagaaataactccaggccccattgtattgttttcagggacccattttccagtacaagaaaacaaccactcacaaccgatgctcctgaagaggagagtcacattcgaggtcatagaactcaatctgcatgtacaaatagatagagtagagttatttatgttagggtcaattttatgatatggcaaagttgggcgatggtttggctttaaggttggaagtgataggacgtgggtggatccgatcggggatatgagggaaaaaagtcttattggaggtggaagagttcttggtttaaacaatgttaaggaataaccaggtgtctccatttctgtgtgataggtttatacaggtcaagatatggaggtctcaatcgagtgagctcgagatgcatttgatgcatttgttcatgtcattttctttcgacatgcttcatgtagtagctcaggattactggcggcggtctacagatacagtatgcgagtagcggaagcacgtggagcttcatgctatcgtcgccggacaagggtgggtacgtggcgcgatgaagttctcgccggaccgcgctacggtggggagtagcgcggtgcccgggtggagcagcggcaatggcgtgggcaacatggcgaagcagcacaagatggctagcttgggtgggggtgtgctgatgcctgcggggaccgcaccgctgccgacttgctatgcctgctcgacgaacttgtggggaaaccagcaaaggagaggtgaggagaaatacagtggtcgttgatatacgggttccacgtactgactcagccagttgaccaggttaacgagccacgtcagcgaaaagaactttccaatactgctaagggagttagattataccagttttgaaagttcgggatcaggatatctgatattgcggttgaaggatacaaattggattagtcatatagttgaaggagttaaagtggacttattcctagacttttaggttggtttctttttcctactttcccaacttttatcttctcgtttttcacgcgcacacgcttcataaaccgctaaacaagttttttttttttgcaaaagttttatatggcaaacttgcttaaaaaatcatattaatctattttaattttttaagctaatacttaacttatcgttaatgagtcccttttttttttcgccggaggaatttgttcccaactgcagttggcaaacacagccttaagtaagttggcagattgtgcagaaggatgtttcggctcagggcaaataagtacatatcagatacttcgagaaaaccgtaagttgtcaccacattatttgatcactatggaccaatcagctagcaggaatcttgcctgcattagaagtaaaaatattaggatttgttatagcggaagaccttatagtacttttggctttctattgatatatgtgtgggatgtgtgaaaaataaagttatttaggatggagttaggtagtatcacaaagttgatgtgaaaggacatgtaggctagtggttgctgtgacttaagtagcatcccaaggtcctgagttcaaatctccataggagcgaatttcagatgggttatttgagggctagttccctgtttgataggctaagttcctattaaaaaaaggctgcatatatccggttagatatagagaccgggtaaaaaatacccttctttaaaaaaaatatagtcattaggcacagctttcgtttaggctctggaccagcccattgtgtgtaagggcaaccacaatgattatttaccaacttagtagtaagatgggtcccgatgtcagacaataatagttacttgtaggcatcacaatgtttaatacctgaagtggtaagtaaggtggggtccacattgagtgccatgtgaggagattgtcatacacacactaacaaaaaaatatattttaatggcttattgccggtagtaagtatactacccagttataactattgccatctgccacaatgtatcttgctaggtaagaagtcagcattgattgcttattacccgctttttcttcacattgtggttgctctaaggctaaattggtaataaaagaaaaaaatgtctattaggtcccgtacgtgggttaagttttaaattcgtgttccttaactataataccaggtatggagcatcttccaacttttagaactaatacaaaataaaaaccctcgacagttgtcaggtggtttcgattgatatatatgatatcctaaccaagcaaaaagaaaataaagaatacattggaactccatataggacccatacatacgtgaccaccccaccttcttccttcatccccctcttctctctcttcactatatcatctctcttctctccctatggagtcaactgagagctgagctcagagatgacgcacaacgagaatccaagtggcagctagtggacctcctcaagcacgtggcagcgatgagaagtgaggcagagaactagctcctttctcggtcgagcctccttctagatctgcaggggaggcgtgctcgccaaagccccactcgtagaagctcgagctcaccgacagctgcaccctaggagctcaaagaggctgcgagagctctaggacgtgacgagaacaccggaggtcaacaagctagtgatgtaggagctcgaggatggcgagaagagagctcgccatgcatgtcatcccacatttttcccatctccgcagtgtgcatgaacacatctatgacctctacctcctagacaatgtcactcgatctccatcataacagcaccagacctcgccgctaatcgccctgggctctctaggtcgttgggaggggcagtgccatgtggaggttgaagcatcgccaccttcgtgcatcatcccttgccaagccggaaagaagagacgaggggagagagcgagtgtagaggaggaagaagaggtgatgtcgctgacaaaaggatagatgtaacacctcaggatcgttgaatcctgggtgttacagtagccaaaccaatcagtgcgcacacttttcttaaagtttgtgtgttacattataatcgttgtatatttataatgtaactagaaagaaagcccgcgcggatgcgcggacattttttttattgtttatataaataatgctaagagaattaagtcatatctcaccatatacatataaaaaaattatagattttgcctcatagtaacaaaaatttatgttgtgaaatagaccgtagtatttaatataaatgataagaatgtctcttagatttaaacaaaaatcactttcgtccaagtaagtgtaaactcttttattatcaccattacttattatcattgttcttagaagatatatatgtttttaataaatggaactccatctataccaccaaaataagtccacatcattaacacataaaacattcatttcaactatgtacctaaatgtttaagtcaacacttatttctaaatctataaataaatatttaaaactaacgtttctattggttattagggtaacaccgttaaaaaataggcatgaatgcccactctaataggtggaacaatcaaggggttgacatagtcttgcctctcacaatctcatggcctatatgctgcctaatttatttaaaaatatattatgatattaattattacatgtcagctccatgtgatgtaatgtatttagcactataatataactatgataagttattaagatttgaatacacctaattaaaagttgattataaaatttaaaaataatctaaaaaaagggcatttaaacacatttaatttgtttttatattgatctagtttaacatgcatatttatttgtcgagtaataaatttttttttatagtgtaggaaatcctattttgaaaacagtctatatttttttatggttctcccaacttatattagtacttttaggggtttatagctttattatcgtgtgttcatatgtttctttgtttttttcaatggaacatccgataaaaggtttctctcctatacacaggagattaaaaggacacaggctaatctaatgatctaaaataatgggtctatcattttaaataaaaattgacaatgaaattatagattgctacgtggcattctaagagtgcttgcagaaataccacatgaccatatttgcggagtaataaattttatttttgttgtatagaaaatcctattctaaaaagactgtctattttttttctaccgacgtacaaacatatttagggtcatatagcttttatttttactcgtgcatccatacgtactttttttagggaatagtatctaacgaattattttgttttatagtttttttatcgtagtatatactctgataatatatttttttgggctatatagctttattatcgtatatatgtatgtttctttgtattttttaattgaacatccggtaaacagtttctttcgtatacataggaaattaagaggaaacagactaatctaatgatctaaaataataatagtccattattttaaatgaaaattgatagcaaaattatagagagtcatgtatgtggcggtctaagagtgcttgtaggaacaccacatgaccttatttgtggagtaataaattttgttttttaagtatagaaaagtctattttttttaaaaaacgtctattttcttataccgacgtacatatattttttaaggtcttatagcttttatttttactcgtgcgtacgtaagtaatattttttcaagtgaacattatctttttttaatagttatttatcgtacgtaagtactccctcctccgtttcaagttataaaatgtaactgctttaagttgaccaagtttatagaaaaaatagtaacatttttgacccaatataaatttattataaaaatatatttaattattaatttaatacaaataatttggtaatgtaaatattactatatttgtatatagttaaaacagtttaactttaaccaaaatcaaaacatcttataaggggaagtatttttttttcaaatgaacagtatgtacgtacaatcacacgatgccatcgcatgtacgtacctatgctgaaaaggtttagtttctttccatagtatacgtacgtaagttttcctggtgtttctttccatagtgcatacgtacgtaagtttttttttaaacggtttcactcatatccataggatattaagatctaatttaatggtctaaaataacgggtctaccaatttaaatgaaaatcgatggtgagattatatactgccacgtggcaatctgggagcgtttgtaggagcgccatatggcggcttaggagcgtttataagaagattaataggcttttagtatataaagatagatagattatattatagtcatatttgaaagttattttaaaaaagtatgatatatttttaagacacttctcttgaattatgactaatttgccaatacaaatatatatatatatatatatatatatatatatatatatatatatatatatatatatatatatatatatatatatatatatatatataaaatgactcttgagtcatgcatgaccatgtagtactattatattttaccccaacacgcaagcacatgactatatgagacaaggcacattatatatcggtagtataacctggagtacctaaccccatcattgtacacatataattaagtaatttggttggctaccaaattatatcaaattaaaccttaaagtccacgcaccgataccgctaccgccggctgctacccccgttggttcgtatacataagccacatacgagcacaaatctctccatatcgatctctctctcacccacgcaagctatatatagcaaacaaagatatgggtcgtgtttacctcccgatccacagtgtgctgatgcacgtcgtcgccgcgctggtggtgttggtgtacatcccactgtctgtacctgtccggctgttcttgtgggcgttcgtgaagccgctgaggagagagcaactcagaggaaaggtcgtcctcattaccggcgcctcctccggcatcggcgaggtaatctaattaatcaactagctagctcctcgaggtaagtgagtatagttaattgttaattgtacgtcctcgcgggattgaaatgtacagcgtgctagctagataagggtatataaatagtggctatagttaagactgtaattgaagttaattaccggtcatgaacgcctagcaattctagtttgtcccatctcaacatgccagatgtactgtgttgtttggtggccattcctatcatggactgatgcagaatttttttgagaattaatattatttttatggaaaatcgcaaaagtagtggtcaaccggggaaaatcgcgaaaataggtccctgtcgaacgggtgcagttcgatagggcgcctatcgaacggccagagcgcgactggcgaggagatcggaaggctgccgttcgacaggacctgtcgaacagcccccgttcgacaggcagggctgtcgaacagcccccgttcgacaggctgggctgtcgaactgccgcagttcgacaggatatccgtcgaactgccgcagttcgacagggtcgcgttctccatttatttgtaataagttattttttttaataatatgtaatttattttagtgtgtaagaaaggaaaatatttttgtaatgttatatgtatgtgatttagggttttgataatgtttggtcagaaattgtagtatttatttgttggttaaaatatttgaattatttagtttcattatttgtatatttgaatgataatttgtcatgattcattcgaagggtatgctactgagtaattatccgaagaagtttatgaaatagtactgatagtactaagttaatcgtaaagtgtttcttaaatagtacggacagaacataaatgactaaaagtttaatacaaatagataagtcaaggacgatcagtgcccttcgcacgcttgctaggtcctcccttcttcctacgcctaatctgctcagtgggatatgtcaaattatcaggggggtgcctatctctagctgcctggtgtggtgtcacgtctggcccctgaccggcctccgtctcctgcgtcggctgtgtgacctgaggtgctgcgtgccagtaatccatccctacttccccctagggaggatcagtggaaaagaagtcctcaatgaatgctgtgcgaggggagtaagcaggcactccgtgatgcgtcgacgccgaaccgtattcatcgtctgtttgtacaagagggagaaaccaaaaaatatggcgtagttagtaacgatacatataattagaaactaaagcgtgttattgtttaaaatgacttacatgtgtgctgtgtgtggccctgctctggttcctatcgatctccttgtctatcagctgcccatcattttgatcagccatacctgcagatcgaaaaccacattagtacaatgcacgtatggtaacagtacaataaatgtatgcaacataattcaattaacaaatttgcatgccatttcaatttaaaattacagtaccagcacacatagatacagataagaatagttcagtacatttcaatttaaaattacaagcccacgacacatatattacgatattacaagtgcagtgcagttcgaaatttaaattacaattccaatacaaatacatgacgatattaaaagtgtagtgcagttcaaaatgaaaattacaaggccattacaaatagatttgggtaataaaagtgcaagaaagttcaaattaaaattacagacgcactaaacataaattgaacgataacgatcttcaaagtagggagtccaccaaggataatagcgaactaaggattatttttcttcttcgacttcccctttggaacgcgacgaacatcagcgcctgtggcatcttgccctacattgtacatgctgcaatctttacgggaatggttctccccgcaaagaatgcaagctttcttacgacgagaacgatctttcacttcagcttcatccataaggttcttgatcctgcgtgactggcgatgacccttagtatcaactaataaatttgagtcaggaacccaattggcttgccctggaggaggacgagtgaaatcacacacggcacgccaaccacgcaattcaccacgccaagttgcctcccacgattcctttctaaagtagggagaaacaaaaatgtttccatcaacacccccttttgcggaagcagcaagaacgtgggaacatggccgatgtaacaggtaaggcttgttgcaattgcatttgcaagcgtgatactctggccacaacgtgcattccaatgtgatgtcagtagtcccaatgccgacaccactcttgtcacgaagtcgtatctcaaataacaactctctattcccagcatgccacactctgtggattcctcccttcttacttttctcatccatgtactgtgtaatagcggggctatacttaacactgggtttgctgaggttcagactagccatggaataccttttacagagatacttctgtgtacccctcgtgatgccctccaggatagcaacaagtggtagaggtcgtgtattcttcataacccagttatacacttcagcaagatttgttgtcatcacaccataccttgatccatctgtatcgtacaacaacgaccatttctcccttggctcaaattctacccactccgtgaagcacttcgtggcccttccacgcttcctgcgccgagtaatacttggtgcttcattaggaatgggttcaagtccctccggctcctcctgtctggcaactatgggttttttcctaacctcttccatgtgtgtagtggtcaaacgatccagttgctcccatatggcatcaaactttctttgttgattctgcttgcataacttcttgaacaggtccatcaatctcttactcctgaattgtctataaaaattagccccaaaatgtcgcatgcaccatctgctatgtaaatctggccatggcacggactgtgtgacatcttcttgaagcttctgtatcgctgatagcaaaccggcgtgtcggtcatacagaacacacacatttggtctgttttcaacaacacacattttaatgtgccgcaaaaaccatagccagcttgatgtgttctcgctttcaacaaatgcaaaagcaacaggaacgacatggctatccgcgtcgactccgatcgcggttagaattgttcctctgtacttgcctgtcatgaaagtgccatcaacacagagcaaaggaatgcaatttttaaaggcctctatcatgcacccaaatgaccagaaagcccgacgaagaacattctccccatattcattcacctcatcgagaatagccatgtgtgtgcccgggtttcttgcctgcatcacctccaatagtgggggaagattgtgataagaatcctcataagttccaaacctcatctccaatgctttctgttttgccctccaagccttgtcgtacgatatctcatatccgtactctttctcaacgtcatgcattatggtgaaagggggcaaagatgtttttctaaccacctttgaatatactatttgtgccacaaatgccgctgtcaggtttctgtgcaccagacgggtattctccaacaaacacgtatgttgctcaaccctcgaagctacccataaagtgtcatgttgtggcttgtaaccatgcactctccaaggacatccaccctgtatgcacttcacgtcatacgtcgtcctatttgaaaccttcaccctgaactcacgcttctggacaaatgcccacctcttcaccgcatcttgtaagtgacctttgtcatgaaacatctgtccaactttcacctgcttactatcataacaccagtgggcatctaaaccatcgtttaccttcatacgactcattgatatggtcgtccaattatcgggatgtaagtttcgttgtcccatagtgttgtatcttctccttccactacaagcgcaatgtattcctcgttttccacttccatctgatccactaccgcctcattctcctccgctgcatcaacacgcataggcgaatccggttcttcatcgtccgagtcgttggcctcacgattagtaccacgaacaatgacctctccttgtgtattaccctctactacttcttcccctcgaccttgctcagtccgccaaacattttcagcttgtccaccttccaacggagtttcttccaccacggcatgacttgactcccccgatcgatcaacacatgttgtcttctgcaccactattgccaggctatagcctttctcccttactttactaacaaacttcctccaactcccagttgacgcaacctccactactctccactgccatccatgttgacccctcactggccacacggcatttatgacaaatttatcgtgcactggatctaccccaaacatattatacaaccaccctaacacgtcgttcaaacccatatgctccggtgcattcagactagtatcatggaaggcatatacagtcaaatccaccccgctatcacatatttgtataggagcatcgccataatacagacgaatgggcatatcacctgacatcctgataaaacatgacaaatagtctcacgtttaatcatttaatcattcgataattaccctattacaacttatactacattgccgtgtactaatttacaactattagtaacaaacaactagtttaataatccaaataaaatataacacctttgtacatattttaacacacaacatatcaataatatgtactaactaagaactaatttaaccgtacaattacttaaatacctctaccaacatttagcaataacaaatatgtgctaaccatacatactaacatcgaacaatgcgaaacaattaacaactcttaaaccaattttttattaaactttcatatgcattgtacttagggattactaatgtataccttaacttcactgctggagggcgtcgccaaccctttcctcccggccggcgcctcctcggcctcctctccggcctgctatcccctcccctcgctccctccggcgctcacggcgacgatgtggcgactctcgacggcggctggcgatgtggtcctcaaacaaatcgaacaagcatcgcgggctggggagacggggctttaaaccggcctgtcgaacgcccattgttcgacagggtgggtggagggacctgtcgaacgcccccggttcgacaggcctggcggcacggggtggtgggccctgtcgaactccctccgttcgacaggcgagcgtgtcgaacgccagccgttcgacagggctctgtcgactgcccgtcgttcgataggtgccctatcgaattgcacccgttcgacagggacctactttcgcgattttccccggttggccactacttttgcgattttttataaaaataatattaattcttaaaaaaattcgactgatgcacacctagctagctatttgatatgatgcagccgtcgtttctttctacttccctgtgggcaccgggccgcggtttttttcacttttctttaaaaagaactcatgcattttattgattatagataactaagtacatatcacatgagttatcacttattcctagtggagagtcaaccgcaagtacaagcaagtttgcaaaaaggccccttgaagatggctaacttaacataagcttctgaaatttgctaggaatgactcataagaaactagaaaaaacaattaagtcctactcttctcaacctgatagcaacctagctaggtccatggctgcaaccgtgatgaagaaaccaagaatatagttgaagatgaaggtgtaaggaagcatacctaaaaggggcctccgcctgtaggttaaggcttccataataaaaccatgaaaactcagcttttctccgatgatgcactgtcggtgatgaaggaggcttgcatccttgtggttgcctcgctagagataaaccaaatggacggtgcaaccttttgtgaagcaaacttgttttacttccagtttgaggatggccaccgggacaagagaaatgtgacgctggtgaactcttgaactacacaaaagtaccaaaagaaaagagaaaacaaagggaaaaacactactatggaaagaacccgactatctggaaacccccccccccccaacccccgatggaggaaaggaactggatggaggaggaagaatgacatttttttccacctggaggaatcaccgagagcgagaggatataagaccctccatggagtggccattagtttccggtttttgtcattccatcggtcagctccaaagaccaattttgaatggaactccctcccattttactgctatttgctaaattgctaactatttttaatttaaacaagtaacagtattgtttgataggacaaagtaacagtattggttgcatagtcttagggcttctttggagtttggaacaaagaaaaaatagaggaatttctaagcacttaaattttataggaaaaattactataaggctttttcataaaggattgggcttctagaattccttttgacattcttgttgaatcgttgaatggcatgtttgattggaattttggaggacttctagcataacctcttgaatcctatcatgatattttaatcctctgttttttttttcatttttgtgttttcagaagtgtttcaaaatagcctttagttagttacatgtaagcgtaacatgaggggaagtcataaaaaaatgtacccacttgaaaaatcatattgaatttatatatactggtcgccactccatgcgttgcacaggatataaatatttaaaatttcaatcttatcgcaaatatatatgtgaactatggaggattagattaaaggattattacccttgttttcaactctaacagcccatttggtgggagggagtttttagaagggattaagagtttagtgggatgtgactattaactattttgtttggttaagaggtatgggaatttcggtgtgatggggatagagaattgaagaataaacttcctccttttcaatacctgagtaagggatggtgattgggagggaattcctcctttactttgcctaaacaaatctcaactatctgttttcatttatgacctaatcttcaactaaactcccattcaatttccactacctttaccaaacaagatattgggattaaaaatcaaattctcatcttgattctccctatcgtttctctctcctaatccttttcccttgagttgcaaaacaagccataaaggtaattttaacctaacttttcaactgattttgcccttatttttctgaattggaacttgtgttcgccccgtttcgtcaaggggactttaacgtacggcatcaaaagttcaaaactatgtgtgcgcttcgcttgcaattttgctactgtttttgtgagggctttgtgagttactgtttttgtgacgtactattgttgctttgctaacacagtatacatatatatgtaacatatcgtttgtggatttgtgcacacatgcaggaacttgcctaccaatatgctagcaaaggggcgtccctcgctctggtggcacggaggaagcaggcgctcaagagcgtcgccgcggccgcccgcgagcgcggcgcgccggacgtcctcgtcctcgacgccgacgtctccgacgccggccagtcgaggcgcgccgtcgaggagaccatcgcgcactacggcaaatgtactctacacacctgcaactaactggacgtttttcttatttcttctttaattaatttgtcgactctgatctttgtcttcttgattattcatgtgtaactaatgtgcagtgtgctgcatgcagtgaatcatctggtcgccaatgccgggatctggtccacctgccctttcgatgaaatcaccaacataaccgcgttcaccacgatcatggtaaatccaagttcacaacaaacaaaacatgtgcatgcatgcatgtagatatcgtgtactggctactttgaagcttgtaataacaaatctaaaggaattgtttacatgaatttcaaggatgtgaatttctggggcgccgtgtacccgacctactacgcgctgccgcacctcaaggccagcaggggaaagctcgtcgtctgctcctccgcggcaggaacggtggccacctcaaggatgagcttctacaacgtaagtgaccagattaacgccacaaattaaaacataatcatacagttctttttgcgtcttctcctgatctccatcgatctccaagctgtcattgatcaaccatgtctctctttcgccctctttttcaggcgtccaaagcggcggtgctgaggttctacgagacgctgagagcggagctcggctcggaggtcggcgtcaccatcctcacccacggctacgtcgagtccgagatgaccatgggcaaggccgtccagaaagacggcgtgctcgtcgtcgaccaggaggccagagacgtaagctgccaattatcactagaacgcattgttaattattccagccatcgatctccactgtaaataaaaaatgctaagattgttttggccggtcgatggaatattgcaggtgcagatcggggtgttcccggtgggcggcgtgggcgccatgtgccgggtcgccatggacggcatccggaggggcgaccggtacgtgacgtggccgtccgtgtaccggccgctgcagctggtcgcgtgcctcgcgcccgagatcgtgagctggctgtcctacgcgatgtacaacaccaaggcgggaggaggagcgccgctcagcaagagagccctcgacgccaccggcgcgaggcggttcttcccggaggggctccgccgcaacccggtcgtcatcaagacggacgaggagtgcgacggcgacgaaggcgtcgccgcatgtaattaacttgcgggccgtcgcacgtacacacacatacatgctgtgcaggaaataattcgagtcgagcgtttgggtatttgtgtacgagtaacttatagatcacgaggtgttttggacttttggtcgcatcttgtaagatgtaattaagagttatttgaactatgaaataataatagatactacaaatttaagtctagagagtgaagtattgtcacacagaactatacctccatcccataagttacattgacaaagtcctttatattttaagacgagggtactctctccgttttatttataagtcgtttaacttattttttagtcaaatttctttaaatttgattaagtttgtcatattatcaaaagaatatgatagtagagctagtgtggccaaacatgtgtttaaaagtcaataatgttatttattaaaaaacagagggagtatttagtctttgagggcatatgttatcaagtttgtccctctgaaatatagagctagccctacgtggcactctaataaattagataaactcgtagaaattatgagaaaaaacaaaacatctctcatttgatttttacataaaacagtgactccaattaaaccgtcagaatattagattgatattaaacaaacggaacctacggagtacggtcccaccactcctccactgcctactcccaggcatccatcattgaactaacgtgcgccattggtaaacaaaactaactacaccatataatttcttatctgtgtagaataccaccgggcggagccaggatgttgagccactggcgtcatggcttttaattgtatttatgttgtgtttaaaattctaattatttttgaagctagatatttttagctcaaaattcttttggagctagagctatgagtaagttgggattgtttcattttgctaaaaataaatgtttaaagtctattctacaacaatttatgaggtttttaaggttcaaaaatttaaaagttaagactatatacaaccgggcataacaaccatgtgttttttccagacataaaagtatggtatgaaagttatttattattccttttgtccaaaaatacaactacctatgcctctttaagagattaactagctgggtggcccgcgcaattgcgcggctagcacccaaaaaaatcatatattttttaagtatgattttacttaaaatttattaaagctatctcattgtcttaagactttgaaaagaccaaagcttatcattctcgtgtttctaattatatagtttttaaaagtcacaccaattgctaccccttatgtcatctccttctttatttacttactcgatctaccactatttctattcatttttcttggaacctttaaaatttggattttatagtttttagagtttattgttacgttgggtttcatttttataatttctagatgtcccgtcaaacgttgccattatacccctctacggcccgtccactgtctcttctctttattgtcattgagattttaaaaatcgaacataattatcatttgggttcatttttactttcttgaagtcccgccaaaccgtcagcggctttgctattgtactcctctacagcttgctcactgactccctttctttattatcattgagattttaaaatcgaacatgattattatttgttttacttttcactttttagaagttcagaacctttaaaaattagagttgtattttcattttttataattgttagaagtcccatcaatcgatgccactatgcctctctacaacccgtccgcctcctattctttattatcattgtgattctaaaaatcgaacataactatcgttggaattcattttttattttctagaagtcccgccaaccgtcggcggctttgcaactatactcttatacaccccgcccactgcttctcctttttattgtcattgagattttaaaaatcaagtatgattatcaatggggtttgtttttttttcctttctagaagtctcggcaaccgccttactcgtttgcttcacggcctgcctgacgtccctccttttaatcgacattaagattctatttggtgtattattaacaatatttatatgttgtatcaaccgccactgctctactcttttataggcctattacttaatttatatcgtcatgtgttttagatggtcttttctttcaataatctttatttttattaaaaattttagttatttataaattgtattcctaattgaaatcttatttttttcctttctctaatttcatttttttaaaaaaaatagttaatatcgtattgtgttctttcaatgtttttgttttttattttcaatttcagttgtttcaaaattgtattcctacttgaactctcttttactttttctaatttttatattattttattttttatctaaattttaattaatcccgtattgggttcttatatggattctgctttttttattccgaatttcagctaattttaaattgtattcctacttgaactcttcttttattttattttgctaatttcggatttatttttatttttattctaaattttaattaatctcgtattgggttcttatatggactcttattttaatattccttatttttaattccgaatttcatctatttttaaattgttttcctacttagactctcctttccttttctaattttggattttattttatttttatttcgaattttaattaatctcatattgggtttttatatggaaacttctttcaatattgcttatttttaattccgaatttcagctattcattgaactacaggcctaattcattgatatacacagcacatagctaaaataaatagttggttaataaatatgtctaattgcagcattagtagcggattgacagtagcataacccaacgcttccaaagaaagaagctgtacaattgtttcagttttcctgagctccaagccggctggccggggtcattaagcttttgctgctagggtcattagctacaaaatactgaacaattcacttgattaattgggccggactggcatgggcccgataacaatcagatcgtgccatgcttaaaccgggccaaatctccatgccgtaggctgggccgtcgggctacgggccttttggccaactattcacttctccatcaacggcaaacgtaggcagaccggaagcctcaccgttaatttgctcctgcacttaatcaagactagctaagtacgtacaataatcttccacatgacaaactctgtcagaacttaattaagtccaaatcttctatctgtacgcgtaacaacctttgccgcttaattagggcaacatggcaactagttagcagtttactactagtgctaattaatcccaacaccgtacgcgcgtacgccccgcccatgcctacagatgatgccacggcgacgggcaacggcgacggcgccgctccccgtccggcagccgccgagccagcggcgccgctgtcgtccgtgtggacgcggcgggacgaaaagctgctggagatgctgctctggcgctggcagctggacccgcactgggaccggctcgccgcggagctcggcggcaagacggcgacgcaggtgttcgaccggtacgtgtgcttggccgacgagctgaggctcgtcatggcggcgccggcggtggacacgccgcccgcgtgggacgtgcaggacgaacgggaggccgctgtggcgccactacccgggttggaggccgacgcggcggccggcgccggagagtcagcggaggtgacggccattggcatcgctgccgccgcttctccgaatgcagctgctacgagcgctccgaccatcggcggcggggtggtattgaaatctagagagctgaaaaatccgcggaagacgaggatggccggcggcgggccaaggaagaaggcggagatgtggaccagggaagagcataggtatttcactgcttcattatttcgttattacacgagatttctttattgggtttatttttttttccaaaagtgtccataatatttgcatttatgataaatgcattcctattatctagctactactatagagtataatttttctaggtgaacgttgggttataactatctctcataatattgttacattcttcgcacaacaaaattaaacgaaagtagttggattctacttatatatacgtcatctaaatgtacgtgattaattaaactacatgttcagcatactgtctattaattaatgagtaaaatgcactagcaaactttaacttatatatacgtggatgccatctattccgatatataagctcagaaaatgtactattagaccagctttattcatatgttgacaaggtttttttaaaaaaaaaacttagattttttttaaaaaaaaacttagttacttgctccttttacattcaattgaactttaacagctagctgggaaatatcttcaaccttcacctataaaggagagagatggatagaaaaaagaaatcatcactgtcaggtttctcaagtgacggtttgacgatggagacccaacctttggtgttgagatggtggtaggaggtgttgggcaaaggaggcagctttagggaggccataaggacgcctgagctataggtcgtggctagagacatggtggtggtgcctcaaccacaaaaacagaggaggaaggtggcaggcattgatagtagcctagcaggcgaggtcattgaagtggtttaggatgcagggtagcaacgacgatcccatatagtgcgagctaatagagataaaataggtgggatagaggaatctcgtgagtgttaagagagagatgtcaagatcatggagatagaagtgttagggggagtgatggaggtggcaacgaatgcatacctagtgagacaaagggcattggcacactaggagatggttaggtgagcaaggagttggcagcagctataggtgagatgaagatgaggattgagtaccatgtttaagtgctgtaagaatcttagagcaatctaaaatgtgcaaaagcaattgagatttataaaaaaaaatcaagtggcaggcgaatagaaacccttctaaaaccccaacttataaaatgtacactaaaaatctgaatccggtataacatactgagtggtatcatcattagcagtaatagatgggtctctcctatcctcattcctcaagccacgtatttataggaatagaaaagggaaacttatacagttatactacctccgtcctttaatttgtggtgtcatttgaaactaaccaacctcaacaaacaaaaccggaggggatagattggttgatagcgttatgccatactatgttggtgttatcaacgttgcactatatttattggattttaaatatctaaatatgcatttaacatgtgcatggttaaaaataaatttattcgcgtggaaacttatatgttctagtaaaagttctagctagattctaccaagtacagatttgaactgtatctttttctcctaattaacttctgcaaattgcaatgtaacttgcacgcatgcatgcatgtatatgcacagccaattcttgcacgggattagtacgtacgggaaggggaattggaaggcgctggcgagcgagttcgtgaagaccaagagctcgacccagatcgcgagccactaccagaagttctgcatcagggaagagaagaggaggctgagcaagtgcaagcgggcgagcatccacgacatcgtcagcccgacgacgacgacgtccgcgcctgaatctgccggcgccggcccgagtgcaccaccgtgcgcgctgatcgaaagcggtgcgctgattgcaggcgacgatgacgcatgaatggctcgctcgccagctgccagatatatgcttgctgatgcatgcgtgctcataaatacgtggatcttttgtactattattattctcgctagctagttaaaaacctgccttccaaaggaggtcttaagcataatagtgtgccaaattagaacatgggagtgagcaaattaaaaagcaataaaacatactctctccatcctaaaaacaaaccctgcttataaatttgggagggtttatcttttttttttttgacagaagggtatatgtttggacttaactatttaccacttttagtttggcgttaattacctatttaccacctatgtgtcaatgatatgtgggttcttatgtgttaatgttatatgagttcagatgacaaatcattaattgcagtgataaatactccctccgttttttaatagatgacgccgttgactttttcttataagtttgaccattcgtcttattcaaaaattttatgcaaatgtaaaatatataaatcatacttaaagtactatgcatgagtgataaaacaacttataacaaaaattataattacgtaaatttttttgaataagataaatggtcaaacatgtgagaaaaagtcaacggtattatctattaaaaaacggaggtagtagttaatttttccaccgtatctggttagggacaactttgttccgtcatggtttatggttcccctgaaacagagaactttcaaaggtgttatgttttcaaatacgagagaggctggaaataattgtggaaatctaggtatttaacgtgatatcaacttcatggtttgattgatctttttggttgagtttcctatatgtgtaaaacattagtactaattaaactaagtgtagtagtggactcctcataagtcataacgtatgtttctcaaaagggtagcaatggttaaaaattaatttcaagtgttatcaccagttatactggcaatggctaggaaagtcttcgatgattaaaactactcccccgtcgtaaaatataagtatttctggacttcgacacagttttcgagatactactttgaccaataatatttataaaagtaatatgttttaaataaaaagagttgcatattatgatattttgtttaatgataaatctagtaatatcaagtttacatgattgagctttttaacttttttttctattaatagtcaaagtttaaaatgtttgactgaacactatgctaaaaatgcttatattttaggacggagggagtagtatttactgatgtattaaaaaaaaggttttgaagaaactttcgatttttttaaccgcttgatgcacttgaagattcgtgttgggctgaatgaaaaaatttgcacgagctgggaatcgaacccagaacactccgttcacaccatgcatatgctagctatgaatgttttatgttgcttataagcaattcatacgcaagttatatattacaatgcatttacactctaattataatatagttacaacgcagacgcagttacactatagttataatgtagttattctataagttgcatttgaaagtttcttagccaaaaaacttgcgacggatttttagataaacaccgcatttgtctattcaacatatgacagaaaaactttcctgatatcttgtaaattttaggcggttggatcactttatgattcatgcaaatcctccaaaccctaatccccttcacctattcttttttccttacagtcgtacacgcgcttgagtccaactctccacgacaccttagcgactcttgctcccgagccgccgtccggcctcacctccatccccctcctctctccccggccaacctccttccccttcctcctctcttcctcctcaaggcgtcggcggcatggtgcccccctcccccgcctcgccggattcgccctggcctcctaactacaaccttactttgcccccaccgtcaacgccggcccaccaccctcctccatccctacggtgtccaaggtgtccaacacacaccgccgctccgacaacgacgatggaaggggcagctctggtggcggcggctgtgagtgatggcgacggcgatgacgatgacgaggacggctgtggagacttcgagcgacatcgacggcgtcaacgaggacagcggcggcggcggcgagctaggttttcgggatttttgggattttttttattttttctttttgcaagcgaacgacttaagggactgcagatttttgcatgcaattgccctagccacatgtgaagattgcgattttcgcagacattttaccgtatgcgaaaatcgtttttaaccgtttggaaaaacctcaatgtacttgtttcaaagatttaattgcaacgaatttaatggtgcaatcggatcatgatttggataaataatttaagataaaaatagtttaaagtgatatcagcatgatgtgagcgtccgattttccaaccccaggatcaggcgcccgacatgtagttacctcccaactctgagacaaaaaacctgggccactgtttctggctcttttgtttggagctttcctgccaaactttgttcttgtaaaccttctttctttctcttcttgagtaaattgtattggtggtatacaaacttgttaggtgggtgtaatttggtactaaacttgtaaaatgctcgtttcagtacacgaacttgtctagtccgtgcaaacgaggaccaaaataacttgaccatgttaaatttacgatgatgatgttgattaggatgtgatgtacatacgtgtagtgagtatgcatgcataaaacatgtaatatttataaatttgatctctactttatcctttgtcatggaaataatgaatttcatatatttctcacccttatatcattgctctttttctttatctttttctactatcactatatctcattctattttttctaattaaagagatgtatgtctaataataactttctacataattttctaaccagcccctaaatcaataagattagccatgtagtgtcctttttgcctttcttcacacgcaccagacaagttctttcacgaaaacaagcactttacaagttcgtgcactagattatacccacctgacaagttcgtgtaccgacgatgcaatttacttttctttctttctttctaatgaaatctcggccaggttcctcctcccgggccttgaaaaaaaaatccttgaaaaaaaaatatttcgaatctctgactatcaatgaatttacaaattttgtttgtgaacataacaacagtatgtgaacatttatcaattttcataataatcttagttatcatacatgtcagattataaaaacctaattctgttaaacaaattgtggtgagttgcacgttgaagataatcaaataatcgcgtgtatgtaatttttctaatcgttggagactcagagaatcttggaagttatgaaattgtggcgagtcgcacgttgtacagtgttgtccgtttattggtcactattcctacgttagcttgagacaataataaagctctgaaaggacagattaagaagatatcacgttaatcaaaaatcaaccacgatatctattaaaaagggaaagatatatctgaataatggatactgtgtccccctggctacagcgagtcagcaaccttcagcttctgtgctcatatatatataaccatcaccatacttcctggaagaagaaacccagcacaaatagaacaccggttccccatctcccaatctctcgctctctctagaacaaaaaggagagatggatttgtacctcatgttccacagcgtgctgatgcacgtcgccgccgcgctggtggtgctggtgtacatcccgctgtccatgcccgtgaagctgttcttgtgggcgttcgtgaagccgctgaggaaggagagcctgagagggaaggtcgtcctcatcaccggcgcctcctccggcatcggcgaggtacgtagtacatgtatatgcataataagctctctttaatctttgtcagattacatacaaacccaatgcatcttggatgcaatagcaaaggcagaagtataactgatccctcgatctgtcacaaaatacacaaagtacagctatttcttcttcatcgactctctcgcgtctcagttaagcactgtatcattacttatttaatttcttactcgtcctaattgataagaaaatcgtccctatttaatttcacatctttccttaattccctgaaaaacataatttcacatctttccgtagtattgtcggcaagttacgtggaaatgctactaatcgagctccgtctgaaaaatcaacgccgtagtctcgtgccagatagtcaaataagcgtgcatgtgtctgttatctttggagatagagaatcccggatatcgatcttatcgagttcagaagcgtacagggtgtgtgttgtgttgttaacttggtactagtggccaatcttatcttagcttgagagagttgacgctgcatcaaagtgtgacgagaaacgtctgggatttcccgtgaaaaaaaaaatgcggggtgactttggttagagcaagtttaatagtataggcaactactgcctccaaatcatctatacctaatctaatagctcatcttctatctattatatactaaaagtccattaaattaaactacctacaaacgctctcatgctgtcacgtggcactctacaaatactcctatgccgccacgtggcgctctaataaatttagagaaattaaaataaatctaaccgttagttttcatttaatctgatggacccatatttttaacattggatctctaaaagaaataaccaattatagatggcccacgtatatagaagcccacatacgtgcatgaacgcacgtacttcatgcaccggccccacgctcctcttttcttttttttttctttttcactcatatctattatatatactaaaatttcactaaatttcctacggaacctaattaactattctagcccatagatattattaattcagcctatctcttctctacattataaaaattgaagatgtttttgccatcgattacgtacgtcgtccgactcattaccatgtaagcttatttttctgtccgattttctttttcaccgcgcgcgtgtacttcgtgcccgtatttttttctttgtccgattctcttcccatgcattccaaatcgtgtggcgtctaggcccatgtcggagcctccgccgtctcctcgcttgcccacctcattggagcctctgtgaaaaaaacaattggaggccggttgcaacctctggatggtcgacgcgtggataaacagcccatccaacggctgggcaatcggctccagacagcccatccaacagctgggcgatcggctccaggcgagcgtgctattccgcgtaattcaccggatctccattgtcaacgtttttatcttgagttctgtggattcgatataattttaataaaaaaataaaagaagagattaaaggtatcaaaagccctctaattttggggatcgaaaaagattcgaaagattagattgattcactggttctctattgtcacctttttatcttgagttttgtggattcgctctaattttgataaaaacggaaagaagagtattgggagatcgagaaagattcgaaagattagattggatttgatgagaaggagcagatctgtatcttacaggcacgggactgtcttctggaggttgaagagagttgggcctacagcgggtcaaagagaggcagaccaagcagagggaggcaatgggctgggctggaattgaaaagtatataatgataaaaatgttttttacccgttgcaacgcatgggtttttttttggtatatgtaaaaatatatgtacgcaccagtaatatattatgggtattatttagtatgttgggtccggcgtccctccttttttttttgactcacatgaaataaacccaaattaataatttcaactcatagttgtaaaagtatatgttatttcatgttgtattctactagacatatgtcatcaaaatatccataaaaaatctaaataaataatatacattatatgtatatcacttaattacatgcgttgttaaattggacgtgtattttcaaaaaaaaaactccacttatgattagcattctaaaaaaattgcttactccctacttaaaagtactaatatattgaaatgagattagtaaaattataatgtattatgtgttttatttatttatatattattcaaaattaaaaatcaaatatattagtttgacaccgtgttgttgtcctttatctcctactttagacttcattcgatcaagctcatttggtgtgcttatccagggcactcggaatgatccaagtcattagcaaggattgattgaatactagaattaaaaatgaaaataaatttatttcattttttaaaaataacatatataaacactgtttacaagacacgcatcgcataatatatataccatttagcagtttgggaaacatgctcgacataaataaggaagtagccaatctgataatcactttagaacatagccttaaatgctttacttaggtactaaaacattaatacatattgtacagtatatttgtatacttggtcaatcgtagcctaaaatatcaaacatatgtcatcactgatccccatgtatgtaagttctatatacaagccactgtccactggtcgctaaataatattacttacgaggtatccatgcacaatgcacttaacaattaaccgatatccaatgagcacgtgtgttatccaacaccgaagataaatggtagaagatgcaaatgatagttgagtacaagtagattacaactatgagtaatgttattctcacacttttacaaatgcttctatgatgtcacgcctaataaattagagagaataaatgaaaaattatataaaaagataaacatcaatccatcaatttacacttaaattgatgatccatgattttcagccattaaattaaattatatacattaaagtaatccttctatcctaaaaaccatataatttatctctacataagtacacatctcctatataagtacgtacacaagagatataaaaagaaaaagaaggaagagtgtctaagatttttcctaaattgaggatatatgaacatagcgaccactcttagcgaggaggtaaaacaagccatgccacggcgctgcctcacgccacccattgcttcactctcttcccgtcaattttgttgaaagtatttttttaataacaatgtaaaaggcaatcatatgagctcataaaaatatgtgcagatgcacactatgaatacacattcatgcaccatatccctatgttagaaaaatatttgttctgaaaaaggaaaaaacaaatatatgtacaagagactactattcgctagaaaaagacatacatataactacattatatttatttttatgtcgttatcatccaaacattgttaacaaattagcacaaatttaaacacatattaacccccacgtacatgcatagctgaattagatgcataatacaagaaaaaaaagaatattaaaacttatattatcttgtaagttagcaaaggatctctgcatgaacaaatattttttatgtggtcctgatcactgaagctattagatagtcgaatgatcaaccctgctaattttttttaaaaaaacatttatatctacacctactaaaattagtactattgattaacatttatatctactctatacaatatatcaactcaagacacaaaaaaaacccttttttactacctccactttcactcattccctattgcaagtatggatctcaactggctatgttgtagtaattagttgtagtaattatacaggagtatgcattattcagttaaggtggtccgagtaagagtttaccgttgacaataaagcttaactggcctacttaccaataaaattatgctccatgctcgtcttgaggagcaatactatatcaatgcagggacccatgagtcaaggcattagagaaaaatccttagcggctatagtcagctttacccgatcattagaatagcattcatatataggtttaattgttttatcctattaattgtagaagtggtatttttaaatatgagataaaacggtgtggaatggacggaaccctaacggcgatggcatttttgggacaaaatcgcttgtacgatggtatttcttggaactcacacttgtcgatggtatttctgggacttgacgcttgtcaatggcattttatggattatctctttaaatatttatttatagatttggacacctgtgagacatggatatttgggtatgatgtggagattaactttttaggtattaatgatgtattgggtttatttttggatacagctgcaattccatctattaaaaagacactcatatttcaagataatgataataagttatagtgaatggtgaatttatatataaccgagataaagtgatttttggttggatatgataggcattatgatcattttgtatatatcaaaatctatggtctatttcttatagtgaatatggtgggatatggtttcttttagtattctttttatagataataaataaattgcccgcgcatctgcgcgggcttaactataaaaatatgctgcaccattaatacccggtcccacatcttatacacaaataacattttggagtccgtgttgcagctggctacaaatctatagcccgctttctctctctctttctcttttcttctcgatatgtggttatagttggcttatagtctgctattgtacctgctcttatcttgccactttgatacttcctccgtcccaaattagttatccttctaccattcaaattttgtcccacaatggctgtgtttagatccaaagtttggatccaaacttcagtccttttccatcacatcaacctgtcatacacacacaacttttcagtcacatcatctccaatttcaaccaaaatccaaactttgcgctgaactaaacacagccaatacttatcactcctagtaatacttgtcccatcaatcacatcacatttaaatttcttcctattttacccctcaaccacccttctatccttaaacataaattattttataagggtattgaagtcttttgtttcaaaccttatgatatactaaacgaccttaaaagataagtaatttgggatggaggtagtagtaaacactatacgttttaaaatatacttcctccatcttgtaatgatcgtcgtataaaaatatcaaaaactctaaattaatcatcgtgtaaccttggctcattcatttgacggtagtattattatatttgtacatgcaaattgagcttatatgtatgcatgcaagcttttggccgggtagtaaagctctcttgtttcttaggcataagaagagttaaagtctatatgaaaattgatttttcccctactacaaacttataataaataagggtgtttggtagagctacacgcctcacacaactccacacccattttaggtggagttaaaactgtttggttgggctttaactctcaagaatgtagagtttagagctggagctatatcatatagaccctaaaatacagagaagttaagattttattgatcttaatgagaaaatgatatgatgattaatataaaacagggagagtaacaattgagttcacaagtagtataaatgtagatatactctttatatatatatattcgtcgttgtttaatcgtttactagtttgatatattttaaaacatatgaagcagtagtttttggtatgacacgtattgaccgtcatttcggttccattcttgcgtagttcccagggcacatgggcgcgaaccggcccaattgcctttagttgtagaatcaagtaaagctactgtatctcgtaaactgtaatgctatctccttctaattagacatctggtctctcatcggtagtatgggttgaacacatgcgattaattaattgctgatgacgtcttctacactcacaaaatcgtgcatgcatggctgcgacccggtcaatgattaactaacgacaaagtgatccgatctggatctgtgcccacctgcagtaactcgttttaccgtagtgctggaccattaccgtcttactccctctgtcaaaaagtcctatacaaactatttcattatttcattttctgtttttttaatgagataggtatatttgtagtcttcatatattcaagacttaaatgaaaaaattatcttttatgttttatcgtgttaaacttaaattgttgatcggaacctgattgttgatttgttagataattttttcttagtcttgttgataaaagaaatgctatgccttacacttttagataaaagtgggagtattgtcgagaaaaatctttttacgactgcatgaacaatattaaattgttcttaaacgctctcgatcggaagtttatattaattaatagtttgctttaatgtttttgacagtcttgcatttaagaaacatggttacgcctatttcgttgaataaatatcgacatcatgaatttcatactaaagtgctctaagaaagaaaatgttcttgctataagcgtgggaaatcatatccaagttgtctgctccctgttcgagccatatcttatataaactctataagattaattggtcaaattattagtagtaccaaaagaattatgttttgttatattataccatacaatatatttttattgttgttaacaatataataagtgaacaaagactcgaaagaaacacaagtggaagggatactttatgtatttgcgtcatgctgatatcagcatgcgagaaaccttccaaaggtatcataccctagtaccgagcaccaggtctactccctccatcccaaaaaaagtaaaagcgaaccttaacatgaataggacactttgtaggacaagaatctggacatagctccatccataccaaggttggctttttttggacggagtgtccagattcgtgtcctagaaagtatctcatccatgccaaggttggcttttttagacagaaggagtaatacatatagatatcaggtatgatattatatgtacagagataaataggtccgcctgtagttacaaaacctcaatatcatggtaccactaacgtgatacattagatattacgaaagtattgctgggatatccacaaatttgtgtttcatgagaaaactcaagaaaaacaaaaaataatcaatttaaaaaatttaatcgaaacaacacccgaacaacaataaattaccccatggcaaaaaaaaaagttactgcatgttccattgccccataaaacaagcaacaaatgattagaaaaaagtgcccaaaatccttcaataaagctagataactcaaattaacgagcaaaattatcctgaaaatcatttctcaaaatgcttcaaaacaaaaaaaaaacacatcattcgattcaccacctctaatcaaagaagctcgttgtggatcacaatgagtcagcaaacgaagctactgcgaatccaaaaagcctcacgaattatccctccacctcgaatgaaggcggccttccataacaacacggagttggtggctattgaccatagattgacggctgcatagtgttctcggccattgagctatgagggtgggagagagagcactccttgagtttgggagagagagctcatgagggtgggacagaggagtggatctagtacacgaatattcacgtagcacgaacgcattagcaggacaaatactgacaagtccagccctcgagcgtgggtgcctttccccttttagccgctagctggcttagtcacttttgacccactaaatgcggcccattgtattttatcccaaataatttgtacgtataaagtttatatacatataatatatacatataaacttgcacatctaaactttataccatacaagttttatacatataaactttgcaccatagaaaatttcggtgtaggcattttatacagaaacatttagtataaaaatttatacacgcaactttatacatataagctttatatcgtagaaaaatttggtgtagcgattttacacataaatatttggtatataaatttatacatgcaaaataattggtatacaacttcatatagagatataataaaaatagggaaaaaaagcatgaatgcgtattttgggccgcatgggccatgatttcttgtctctgcttagagagccgtcacttgaattagctccaagcccataaaagaaaaaaaaggaaaatgcctccaaaaggaaacatgcttggcaaaaatgtaagcaatgacctgttcgctagcagccgcgcccgcgaacatgcgcacacaagtcatttcggggagagagagccatgtgggtgggagggaaagggggagaggatggagaatgcgcataaagtacaatagatgtttatatggttattaattgtctcgtctgaacaggatagagtcttctacatttctattaataatataaacataatataatattttattagaaaaagtacgaattacccccgaactatcacggtcgtccgaattacctcctgaaccacaaaaccggacattcttcacctcaaactatgtaaaccggacgaattaaccccctcgatctaatccgcagtagttttgatctaagtcgtatcccagttagcgttttctaataaaaaaattgtgggacccgtatgtcagtcttcactttcccccctctctcactcttcctctcttctctctcactctatctcactcttcactgattcactctatcggcggcggcgggagacacggaggagcgggcggcgggcggcggaaggcggcgcacgggggcggacggcggacggtggacggcgccgtcgcggcaaaggccgagcggaggcggcgcacgggggcggacggcggacggcggcgtcgcggcgacgcgcacgggggtgggcgacgaggtacctcaccgtgtaccgctccgcgcgtcccgtggcgaggtcgacagcgtcgacgaggcggagaggtaggcgggcggcgacggacaggtggacgaggcgggcgaggcgaacggcggcgaagaagcgggaggcggcggacaggcggacaaggcaggggaggcgagcggcggcggagaggcggacgaggcaggcgaggcgggcggcggcggagaggcggacgaggcgggcgaggcgagcggcggtggagaggcagacgaggatgcctctgcgccccgcgcggtcgccgctgttgctccctcccggacctcccccgcacccgcatccgtcgcgaggttcgctccgcgcgcggtggctcgtcgacgccgtcgacctcgccacgggacgcgcggagcggtacgtggagaggcacctcgtcgccggcagccgccgtccgccgcccgcccccgtgcgccgtgcccgcagctgcctccgctcggccgtcgccgcgacgccgccgtccgccgcccgcccccgtgcgccgcgcccgcagccgcctccgctcggccttcgccacgatgccgtcgtccgccgtccgcccccgtgcgccgctgcccgccgctcgctcctccgtgtttcccaccgccgccgatagagtgaatcaatgaagagtgagatagagtgagagagaagagaggaagagtgggagagaggggaaagtgaagactattacatgcgggtcccataattttttattagaaaacgctgactgggataccacgtatatgccacgtagactaaaaaccaccgcggattgggtcgaggggggtaattcgtccggtttacataattgggaggtgaagaatgtccggttttgtgattcagggggtaattcggacgaccgcgatagttgggggtaattcgtattttttctattttatttatactagtttacgtggcgttactcgaattatattttctctatcatgtgtcactatactgacaatacacgtggtggtgcttaacgtggctagctgctcttgtcattgtgcaggaactggcctaccagtacgcagcgcaaggtgcgtgcctggcgctggtggcgcggaggaagaaggctctcgagggcgtcgccgccgccgccctggagcgcggctcgccggacgtcctcgtcctgccggccgacgtctccgacgccgaccagtcgagacgcgccgtcgaggagacagtcgcgcacttcggcaaatgtagtgcactttcatccttgcatgcgcgaaccgatctctctctctctccctaactgcaagtctgcaattatagaggaggcattattaacgatttgttgttgttctgtctcttgctgatgctgcgtgcagtgaaccatctggttgccaatgccggtatctggtcctcttgctccttcgatgaagtcaccaacataaccgctttcaccaagatgatggtaaaacaaattcataaatcttttcaaatatgttttttctatatgtctgaatgtttttcaactataaagtttaagtctattatattctatttaactatcatgtttatccaaacttacatgtatgtggacattatttaccattagattctaaatcgtttactccaacggttcaacccgcggtttagaccggggtggtttagttactcagcagtccgattttagaaaaataataatgacttggaaagagaagtgaattgcggtttgaatactcttctatcgctgaagttctacttcacaaaaccatttcaaaccaatcctttttaaatttggattaggtgttttaaactttgttgttgctcagattaccacggccctcttttacatcaatgatctcgagcaccaacttaatttaaacgctggtgaacactcactggcctatggccttgtttggatcctctggactattaaatatccctctgaaattttgctatttcgacgaattaaacgtagattaacgacaaaatcgattccataacccttaggctattttgcgagacgaatctaattatgtgtattaatccatgattagcagctgattactgtagcatcactatagcaaatcatgaattaatatatctcgttagattcgtctcgtaaaatagtctagaggttatggaatgagttttgttagtaatctacgtttaatactcctaaatagcaaaattccgaagggccctccggatccaaacagagtcatatatatgcaacacctttgctaaaaaaaatatggatatagctacacaagtgttagaataacacaaaatagttgtttatgacgatatacatcacctacatgcatgccctattattgcatattgatagtctatccattcatcctttggttgaaacatttacacaggacgtgaacttctggggatccgtgtacccgacctactatgccctaccacacctcaaggccagcaaagggaaactcgtcgtgtcgtgctccgcggcaggaacagtcggcacttcaagaatgagcttctacaatgtacgtgttaccaccacaaatgagtcgtcagttctctaaaatttttttcgcctcttccatgtgttcataagacctctttatgtgcgtcacggtatcaggcaaccaaagcggcgcaactgaggttctacgaaacattgcgagccgagctcgggtcggaggtcgggatcacagttctcacccctggctacgtcgaatccgagattaccaagggcaagggcatccagagcggcggcgatgtcgctgtcaacgaggaagccagagatgtaagatatcaattaaatgaaaattttaaaaatggttttatagctccgaaagttcacgactttgatacccccttccattctatattatagttaaactttctttaaatttaaccaagtttttatttatatagtaactagcatggtggcccgcgcagattacgcgactagcatcattatattttccctcgtataatagcatatatgttttctcaatgtattattcaaatatattaaaatgacaacataattttaaattttgtactaactttacgaaactactaatgtgtaatattcatattgtattttatatacgtgctatttattaattatttttaatatcaaattttagttatttataaattatattcctatatagactctagactcgtctttcaatatttctttttttaattcctaatttttgttatctgtaaattgtatttctatatagactctaggctcttcttccaatattatttatttttagttctgattttttattatttctaattgtatttctatgtggactctaaactcatcttttaatatctttaattttgaatttttaatttcagttacttctaaattgtatttctatattgactttagactcttcttcccatgttttttttaatttcgaattttagttatttgtaacttgtattttttatacgaactctaaactcaacttttaactttattatgtttattctgaattttagttagttttaaattcctatatggactctatactctacttctaatattccttatttttaatttcaaatttctattatttcttaattgtatttctatatggactctatactctaattataatattccttatttttaattccgattaattccgaatttcttttatttctcaattgtatttctatagaactctagtctcctcttcaaatattccttatttttttaatttctaattttaactatttctaaattgtatttctatattgactctatttttctttttctccgattaatataagaatttctaggctgtgagagcgaacgtggaggcttctttttctattactttaataagttaatagatgtctacaaacctaaatgagtttcattggaactaatatttaatatattttaataaggtgtttattttgtgttgaaaatgtcgttgcatttttctatagacttaatcaaacttaaaaatatttattataaaaaagtcaatgtgacctgttctataaaacagaggtggtattgtttcattctaacagcatcagagagaggatagattgctccttttacagagatttagcctccaaattaacgctgttcgttcggatggagttgcacgtgtgcaggagcagatcggcgtgttcccggtgggccgcgtggcggagctgggcgaggtggccatggacggcatccgggccggcgactggtacgtcacgtggccgtcgctgttccggccgctgcagctggtagcctgcctcgcccccggggtgctggactgggcctgccgcgcgctgtacggcaccaggaagggggcacgaccgccgctcgggaagaggatcatggaggccaccggcatgaagcgcctcttcccggaggctctccgccgcaacccagccatcaagacagaggacgaggaatattgcgacggcgaagaaggctacggcgccgctgacgatgccgccgcggcgtacctactgcaatgcaggaagggtttgcgagccgcacatacgtacatacgttgcatttttagcctttcggattcaatcctgtaataaaattgattgatactagtagtaccaagtgaaacttaatttacggtagtgaactagggatcttccaaaaagaaaaggtttaattggatccataccactacaaatatatcatttaagataaatgcaacggctattcatgatatgggcaacatggcactgaaatttggggaaattaaaaccgtgccactcatcacattttccgttagaccatgtctgcattcgggatcgatacgaaaaacaaagcacgcgattatagtgaaattaattaagtattagcctaaaaatttgaaaaatggactaatataatttttaaaggaactttcatatagaaaacttttgtaataaatataccgtttaacagtttaaaaagccgcacgcggaaaacgagggaagtgagctgggaaagaggagaaaagaacacggccttagacgtggaacacatatgtcagttctatcttcctccatcctcccttttctttctctcccatctcttcctccatccccgtgtccgctacgaggatagagacagcagcggcggctcccgagccctcccgcctcatatggagtcgaggacggcaacgccaactcccagaacacccgatgtggcctgtggaagaggtcgcagacgtcgacggtggtggctctcgatgcctcccaccagggacgtggtcgatgacggtgattatgacggtggtggatagaggaaggggaaagagaagagaggggaggaaggtaaagatggaactgacggctaggtttcacgtgcaattcagactaacggagatttttatggaaaacgagatggagtagcacagtttcaattttttcaaattctagtaacataaatatagccgatattgtgaatagtagtgatatttatctcaaatgatatatttgtagtggcatcgatccaatctaaaaagaaaaatggtgagaaggatagctcgaacacagtatacaagtacaaaaggtggtgaggtacacggccatccaatctagccaccaacaacaaatatgccttatttttttcggctcgaaagcagtctattattttccaggtataatggacctatgcgaacagattttaatcagatgacaccgcccatccaagcagctttttgatcctaacataaacatttatctattgataaagctccaactcttaaatttagacctaaacccaactccatatcgctagtctattttatgagaaggtcagccagctacactccttttttagatggagctgaaactatttggctaaactccagctacaggagaggtggagctggagctaaaaccgtgccaaacatatcgcagcccggattcattacagtttactccaaccaaaccagtttttgggccaaaaactagccttccaagcagttcaggagtgcctcgtcaaagcattggtggtaactctagtactgccgtactagatcacagattcagagcctcgcaggagctatctcaaattatgctagtaatacactttggcatctttcaggacactccaagaatggcagcaaatgaaaggaaaacctcggccgtagagtgcattgccttacctccttcgatgtgctacatgactaacaaacatcacggtgtgcattgcctttgcctcctttgatgtacctgactactacatgcttgtttgtcaacgtactccctctttccccaacatactccttctgtcccagaaaacaaatctagtacagaatgttacacatgtttttgggaggcagaatgttacacattttaatactcatgtccaaatttatggtactagaatgtatcacatcatatactagatttgttttttatgggacagagtacgtgaaaaacactataaagtttgtcagcactcagcaatcgtaacttgtatgtccagcttaaacaaccaatgtagatttgtggagacacgacaacattttaaatccacctctgtagttctgactgcatttgtggtgcagccttgtaagtacagctggttacaaaagttacatcgcccatgtcagaatgttaacataatcaacttggaataaaaattcacaggttcttacatgttaactcatttggggctgcttcatgggtcgttggtatctgctggtgtaggtccctcgaaatctgctccaaacctacagtagcaaatgcactaaaaaacacctgatttctactcagccaagtccactgcaggttcagttctttggcttctttggaggtggtggaggcaatcctccaccctgggcgcttcgtttgatgcccagaaagtgctcgacctgccaaaagaaaggcaaagacaggattctgaatatggtaagttggattacatatgtacagcttatacattacctaacacccaacaaataatttattcataaagtaattacttaatggaacagggaatgccatacctttttggccccaagcatgggcgtcagactcccagggtgctctttctccactgtagcaaagccactggcatcgctcgtttgactaaaatcacattaaacagaactggtttaggcacttcatcaggaaaactatgatattaataggaatcacatacatagtatgcaaagataactgcacaagctataagcaatttttgataaattccccagcagtcaaatgtaatctagacgtgccttgtacaatctctcaaccagatggagtaatgaaaaaaacagaggcataaatgtgaacctcaatccctctaaattgtaaataaatatccaactacattgggagctcacatgctatcatattaaccattcgaaaatggatttcattgtatatcctcaattaaatataagccatcagtgataatacagatgaaataattgtgctcaacacaaactaaacaaaaataatatctcgtgaaaaaaaagtactgttgtgcaatattaactattaagtccttaacacctataaatccagagcaagtgttttggacttccattaaggccttggaagacatcaaaataatttaaaaagcagcatcggaaggaaaattaaaataagaacttggatgtagaagtatactgtggacataccctgattttgcattgccacttaaaacaaggtatggtgttttgctgagagcttgagcctctctcatcttctccgcagacattaatggtgtgtcagaagatatcattcgcttggttttcaactcatcccgatactttttttggcgccgttcctgcttcattttaccaggtgccttgccatggaatttgtgtgaaagatcccgaaatgcctccttcggtgtcatctaaagcaaataaagaacgcagaccaaccatttgtcacatacggagctcaaattaaagaatataaatgaacataatgtgcaagatgaatgctgagtagaaaatgcaatctaaaaagtaatcagcaacacagcattgcctaaatcatagttgttagtagatgcagtgcagtaagtttcatagtttctatccatgggagattcgtgggtgagggcagttaggacagggtgtagggtaggtacttaccactcgaccaaattcatcaattctttctatgcgaatatcttttggtccatcctcaataccagcaagcttgcttttcttcttatctgtggttctgcctccccaatctgtgccctcattgagggttcctcgttccttcagaaacttcaaagcaccagccaaacccttgccaactgcagcttcatgtacaatctcatctggttttagctcttcttcctcttcattctttactgggacttcaacgctagtttcctctttgaccacggccagcccactcatgtcatcttttgccacagtgtctgacatgatcatgtcatcatcttcatccataaaaacatcttctgcttctggtttgcgagtctctgaaagaagataacaaaagaagccaataattagtcactgcctatgcatttctttgaaattactcacagaaaacaaaaaagaggtcaccttcattcaactgtaggccccacacaaactcttccatctctgtgataacaaccttattttgttgtgcatctccttcggcagcatctgcatctttttgacctattcttgcagtagccagttctgctacagccagaggaccagatgcagcagtctcttcctgtttccttagagctaatttccttgcttgctccagagatttctgcaaatcttcgtaatcttcaccaaaaactagttcttcagattcagcgtgtttaccagaaatatttttctccgggcgcaatgcttttgatgcctcttcagcctttgcaatggctgcttgatacgcatagtttctcttttcagcatcagccttttgctcttcctccctagcagcctgtcgtcttgcatcttttctggacccaagatcacctgtccccagtccagcagcaatagcttcagactcaagtgcatccagatcaagcttttctttcttcctaagggatttctttttctttggtttcttaaactggagcatttcatctggagtataatagtctgatgacatctttgctgcggaagtaagatcttctgtctttttctgcacaaaaccaccttcaattcttttgcggagctggcaaaatcaaaatatagttagtccacacaaagatgcaaccaaagtatttgcaatggaccctaaaaagtaccatggcttctagggatgaagttgaattacctcttccagtttcttttcagcttcaccactgaagcgtccaccttcatcaagtgtcactccctgataagtgcaacaataaaaataactaccaacagagggatacaaagcaaacaaaattgaacatcgcattttactttacctcatcttccattgggtcatcatattgtgagagtatagatttctttgacaagggatcatcattgaacctaaagacaggcagaaaaatgaacattatatcacatcaatccaataaacacagcatgttagcagtaacacatatatgtatggtgaacttacttgtcatcatatgttcctttcttcttcgcggccttgtaagcttcgttcctttgcttctgctcaccaatctcaatgttctcaagcatatcagcctctacaaatatttttctcaagtaagacaatagttaccctaggagctggtacatataaacatgtaaaagcccatcaccttgattgatatccccatcagccaggatgctctgatcttttagggtcatgacaactgcgccaccttccaaaactttatcaagtccgtgaagaaccttcacaccagataagtgttctggacaaaagatgaaaagagtgaaacacgttattctgataacagtgcacagaacactatagctcagacgatatactacacaaaaggcataacaaaataaacttgcacaggattacctcccactcggttatcctcctgttgctcctcgtcatcatcctcatcattttcagctaaaatgttatcctgcaagtttgatatatgaaagttagttgtacatattttaaaatgtatacacataaacatcatggttaaaccatcacctgttcctccaatgctcgagcacgatgtaatgctttctctttttcagcttgccttttttcatcaagtttacgactcttgcccacccacgataatatctcaccatcaccaccattatcatccagtattcctccttgctttgtatcattcagtctttcctcctttgacctgaagtaaatacctgatttagagattatttgtgtcctcaaattttaattacaagatttaacagcgaggaaaaatgatacaactcttgcatactaactatcaatcaattaaactaaagaagagcttaacaccgaaagaggttgtaacagcaatattagacggcagtaagttttagagtttagttgagtattgaacaaagatcaaaggtgtaacaagatggcatttatttcagtatatttgatcgtgttctgtacaaaccaaacctatgcttccattacataaacaagaaatccgggttattgacagcacaaataagtaaaattcttgagctatgtcaacagagcagcagttaatcagaatgcaacaagcataaccaaaagtataataaacaaatacaaaagacagcattctctgtttacaccgaatagttcctggattcaatgcaataaagacaactttgaaagcagacagcaggtctgcatattgaggattataataaagtttaccgtaggaatcttttagcaaaagtttctctatagggtgcttcaacagttcaactttagtatgttactcctggtaaaattattagaagcaatgttgtcttccttcagcttcaattttctgaattcatatgaggcttacgtggataataggatgactaaacccaaaatgcactcaatatggaccacattcagtcggaccagggaaagaaatttcatcagccacaatttagcccagcatgtgagacagtagaagaaaataatgcataaagccatcgtaatacacaaattagcaaaaaggttgcactagatttaaccctaaaaacactagttgacatccaaagatcatcaagtgacagtagcaccaatactgagtcaataaaacaagtttcagatgtacaattgctataaagtggttaaatgctatacattactctggattaggttagctccggatgcaaaattacatgaaaatgatgcataactgaaaacaaccttgtgaatcaaagaccaaaaggattattcaaaggcatacctagcaatgcgctccctgagctcagtcgtggacggtttctcggcctcctctgcggcctcaactctcttcttctgatccccctcttcaccctttgacaaatctccaccgtcgtctcccctgtccttgcctctcgacttgtcccggtaatccttatcctccctctcctccttgctcttgtccctcccgcggctcttctccttgtccctgtccttccgctccctctccttgtcccgctctgcctcacccctatcccggtccttgcctcgatcacggtcacggccacggccacgctcggaatccctctccttctccttctccttctccttctccctcctgtcatctttatccttctctctataactctccctgtctctgtccctgtccctcctcccgctgccgtggtgatccttctcctccctccggtgcgtctccctcctctccttctccttctccttgtcccggtgcctatcggaggcggacctcacgtgcgacatggcggctcgagccaaaccccagatttgggggaacgaactgggaattagcactagggttagggcaaggggagaaaagcttccgggatctagaagagaaaggtaggattaaggcgaagggtacagagggatgagtaggaggaggcgcggcgtgcgggttgctcaccggcggcgaggatgcgccggaagcagcggcggcgacgccgcgtcgccgcgggttgtgtgagctcggtgcaaggcggcggggcggggcgaagtcgcgaggaggcggtgagtcgaggcgaggggataggccgagagggggggatcgactaggagcgaggagtcgccgactcggagcccagttacgctgggctgttggcggtatgggcattctgtagcccggcccaagcaaaaacgaatcgatatgccggccagctctcttttcgggccgtgatatgtccaggccttttccttaaggactaagttcacttgtggttcctcaatttgtcagcgagtctggaattcatccctaaactaaaataatataacacaccccaactcacagtaccgtatcaaatttagtcccttggcagtatagtcaccagtatgttttttttcgcatggtggaaaagtgcacgttggaggagaagaaaggactagcctttacggtagtaatgatatgcatgaaaatgttgcttaccgaaaaagaaagagagaatctattctatatcattgagtttcttcgagtttaacaatttgccattaacattatatctatctataatatatactagcgactttatcaattgttatacaatatgtcattgggttggaacttcttttcaaaaataaccaaaatacccttatggacatacaagattaacaattgatttatctcattagaagttctaaaaaatataaaaacttttatgtggcctccttacacgacataaaaatttgtatagaagtatcaaattttacatttctatttttttaaaaaaattacttatctgttatatactatataaaataattttttattgttgtatttaatataaatcatcttttatacactacataagatatttttgcgctattatctcttgtataagcaaattctatatatgccacataacaatatttttttctaaaaactaaatataccaaaaaaaatttgaagcttatatacaaaatttcatgctgtataaggaggccacataaaaattttcatatttttttgaaacttttaatgagataaatcaattattaatcttgtatgtctctaagggtattttgggtatttttgaaaagaagacccaacccaatggcatattgtagaataattaataaagtcgtcggtatatgtaaatggtaaatcgttgaaacccgaataaactcagtggtatggatcgaatagattctatcaaaaggaggcagaacaagaacaaggcccgcaatctggaaatggagtgcaggttttggtatctcatgtagatggagtaatgtgaacaaggtacttcctccggtttcataaaatatatttaactatattttacttttgttataatattttatgagacaaatctatatatatgttcttctagtgtacttaaactaaatgtttttaaagttgctagtcaaagttataaaagtttgacctaaatcttgtctaaatcttgtccaaaacattaagaattatgaaaccgatgaagtacattcactggtggagaaaccatctttcatcggtcggccgaattccacaatagtcccggttacaataaaaaccggggctaaagatgatctttagtcccggttaaaaagggtaacggacatatttgatctttagtcccggttggtaaatatcatctttagtcccggttcaaatgctgtcatggcctgtcaggcccccccgggatctttagtcccgattggtaacaccaaccgagactaaagatcgtaactttagtcccggttggtgttatgaaccgggactaaagatcccgggaatcattatccccggttggtaacaccaacggggactaaagtcccacccctatatatatgtcttcttcctcctccagctgcctgagcaagcttcaaaatttctttaaaaaagaggggatgtcatgccaaaatttctagtgaatttattttggtgattatatacaaatcggaggtgcctaaaaagttagcaacttcatcgtccaatgtttttttgtcatattacatttggagctatgttctgcacacttttttgtctccaaaatttagttgtaagttgatgagagagaaaatttgtgtgggggagaaagaatatatagaaatttagtttatttgctaaagaaggttttataaaatagttgagaaggaaaatatagtgaaagttaatcttaaataatagaaaacaaactaaaatgaaaattaaaagaagtaaaacacattaatattagtttaaaactttagaaatagtaaataagaattatttggtgtaatattttataatttttgtatgaataatgatatgtcatttttgtatgactgttgaaagagtttgtaattattttataattattgtatgactgtcattattgttagaataattatttatgtacgattttttttcatgtcacgtagatggatcggcaatggatgtacgctgaccggcggtccaaagagtttattgacggcgtgcattattttttgagagtggccgaagctaacaggcataagggttttatttgttatccatgtaataagtgtaagaatcagaaggagtattctgcatccaggactatttaattccacttgtttgagtcggggttcatgccaagctataattgttggacatcccacgaagagcaaggtgttgaaatggaagaagatgaagtggaagacgacaatattccggactttgctcagtacgttggatttgaaggaaatcaaacgggcgaggaggaaagggatgctgatggtaacgacgttgtggatgatcttggtcagatattgcaggacgccaaggaggaccgcgaaagtgaaaagggggcccataaattggacaagatgttagaggaccacagaacgtccttgtacccaggttgcgagcaggggcacaaaaagttggataccactctggagttcttgcaatggaggcaaaaaatggtgttagtgacaaggcatttggcgatttattgaaactcgtcaagaccattcttccggagggaaacaaattgcccgagacaacgtacgaggctaagaagatagtctgccctctaggattggaagttcagaagattcacacatgtccgaatgattgtatcctatatcgcggtgaggagtacgagaacctagaagcatgccctgtttgcaaagcactacgatacaagatttgacgagacgatccaggagaagttgacgggcagctaacaaagaagagaattcctgctaaggtgatgtggtatttccctataataccacggttaaggcgtttgttcaggaacaaggggaatgctagaatgatgcgatggcacgctgaagagcgtcaacaggacgggatgctgagacaccccgccgatggttcgcagtggcggaacatcgacagaaaatttaaagactttgcaaaggacgcacgaaacatacggtttggtttgagtacggatggcatgaacccttttggagagatgagcagcggccatagcacttggcccattacgatgtgtatctacaacctccccccatggctatgcatgaagaggaagtacataatgatgccgattattattcaaggccccaagcaacctggtaacgacatcgatgtgtacctaagaccactggtcgaagatcttaaactattgtggaagaaggaaggtgtccccgtgtgggacgatgacaaacaagaggagtttaacctacgagcgctgctgttcgtaaccatcaacgattggcctgcacttagcaacctatccggacagttcaacaaggggtacaaggcttgcactcactgtatggatgaaacagaaattacgtatcttaagcactgtaggaaggttgtgtacatgggtcatcatcgattccttgcagcaaaccacccagtacggaagaaaggcaagcactttgaacataaggcggaccaccgtacgaaacctaaacatcgcagcgggaaaacaatgtttgctatggttaaagatcttaaagtagtgttcagaaaggggcctggaagccagcctatagagagcgaagatggtcacgcggcgatgtggaaaaagaactctatattttgggagttaccctattgggaattcttggacgtccgccacgcaatcgacgtgatgcacctcactaagaacctttgcgtaaaccttcttggcttactaggtgtatatggaaagtcgaaagatacactggaagcacgtaatgatttgaagcatatggaacaacgcggcgaccttcacccggaaccaaaggagaaaggaagccattacttgagtccagccagctacactcttagcaaggcagagaaggaaagtatatttgaatgcttggagagcataaaggtaccgtctggatactccacgaatatcaagcgaataataagcacgaaggagaagaagttcacaaacctaaagtctcatgactgtcacgtgttgatgacacaactgctaccagttgtaataaggggtatccttccaaacaatgtccgggcaacaataacaaagctatgtgcattcatgaacgcaatttcgcagaaggtcatcgatccagatagattagaagcccttcagaatgatgtggtgcaatgtcttgttagttttgagttgatatttccaccttcatttttcaatataatgacgcatctgctttgtcaccttgtcaaagagatcagtattctcgggcctgtgtacctacacaagatgtttcctttcgagaggtacatgggcgttctgaaaaagtatgttcgtaaccgtgctcgtccagaggcaagcatcgccaaggggtatggaacagaggaggtcatcgaattttgcgtagaatttattgaagacctttgcccaatcggggtacctgaatcacgccatgaagggagatacgggaaaagggaactcttgaaaggaaagcaataatgacggtagacaacaatttattccgtaaagcccatttcacggttttgcaacaatcttcattggtagctccttacatcgaggagcacttggctctagttcgcgccagaaacatcggtaagtccgatgcatggattacacggcatcacattgatactttccccgtgtggctacgacaacatctcattccaggcgaggggaccatctgggtaacgagatgatcaaccaacaactggccttcctggcgaggggaccatctgggtcgatcgcgacattccagggatatgagatcaatgggtacacattctacacgagagcccaagacatgaagagcacgaaccaaaacagcgttgttcgtatcgatgccataggacacgatggaacaactggcacgtattacggtgccatcgaggacatatgggaacttgactatggtcctctcaaggtccctctgttccggtgccaatgggataggttgactggtggaggcgtaatgattgatgacagtgagatgacaacggttgaccttaacaaggttggatactcggacgaacattttgtccttaccaatgatgtaacgcaagtcttttacgtgaaggacatgtctagcaaaggaaagaagggcagagggcctgacgagccgaagcgtcacgtggttctcccaggcaaaagaaaaatcgtcggagttgatggcaagactgacgaggattacgatcagtttgatgggcaaccccctttcacggtgacgattgaccctagcatcctcctatcaaatgaagacaccccttactcacgtagcgatcacaaagagggaacaatagtgaggagaaagtacgtccggtcaaccgtcaccgccgatgtattgccgtaattattgtgtacacgatgtaaactattttggatgtaataattatccatataaatcaatttttgtatggcatatgttaattacatacgattattagaggttttaacaattttaaatcatgtaattgctagttacatgcgataattagaatttttaaaagttttaagtcatgcatgtggcatttacatatgttacttagagtttttaacaattttaaatcatgcatatgctagttatatgcgataattaggatttttaaaagttttaaatcaggcttgtggcatttacatatgttaattagagtttttaacaattaatttaatatcattcatatgctacttatatatgattattcgaatttttattaattttaaatcatgcatgtcgtatgtatttacatatgttaattagagtttttaacaattaatttaatatcattcatatgctaattatataagattattagaatttttactaattttaaaacatgcatatcgtatgtatatacatatgttaattacaatttttaacaatttaatatcattcatatgctaagtatatatgattattagaatttttattaattttaaatcatatatttgcttattacgttttatccacttaatttactacagacaacaataatttttcgaagtaattgtcattaatttttcgactttaaataattttaatgcattattttctattttagaaacacatatgtaatggaaattaatattcagtgcgcttatcagtagtcccggttcttaaccctaaccgggtttaaaaagaatttagaaatagcggaaaaatatctttagtcccggttgatgagaacaaccgggagtaaagattctttactcccggttgttctcatcaaccgggactaaagatctaggggtatatatattcccgatgcgcgccctcgtcttctccaccaacacttagaagttttttccccgatcgttctctctcggcttctccttcaccgccactgcctagggcatccccgcgccgacgccgccgtcgtatctcgccgtcgtctcgcgcgcgtcgtcgtcgccgcctccaccgccgctgcatctctagggtgagagccgccgccgcctccctctctctctctctccgatctcaatctctctctcttcccccaaaccgccgccggctacctcgttgccgacgccgccgccgacgtcgtcgcgcccgatcacgactccgccgcgccgacgatgccgaccccgacctcgaggcggcctgcatcggcgacgacgtcacgacgaagctgcaaagccgacgaagccgcgccacgacgccgcggcggcacgacacgccgggacaccacgacgtcgccgcggcacggcaccgccgcgccgccacaccatagccgtgcgacgccgccgccgcgccacgccgatgccgcgccgccacgccgccgctgcgccaagctgcagccgcgtagccccgccgccgctccgctgccgccacgtgaacgaatgaacgtgaacgagaacgtgaacgtgaacgaacgaacgtgaacgtgaacgtgaacatgaacgaacgaacgtgaacatgaacgtgaacgagaacgtgaacgaacgaaatgtacgtgaacgagaacgtgaacgaacgaacgaacgaacgaacgtgaacgaacgaatgttaacgaacgtgaacgtgaacgaacgttaacgaacgtgaacgttaacgaaaagtgaacttaacaaggacgcgaacattacttaacgtacgttaacgtggacgcacgtgaacgaacgaacgtaggtgaatgaaacgtgaacttaacgagaacgcgaacgtgaaatacaatatataagattgtgtagggttctaatatacgacagttagacttagcatatatgactatttgagttttaatataagattattatagttttaatataagattattagatttgtaattagacttagcatgtacgacagttagacttagcatatatgattgttagcatataagattgttaaagcaaaaatgtctcatgacttagcaactatttcttgtatgaacagatggctgatcgcgatgagggacagatattgtacgatacaatcgcagagggaagcagccagtactggaacgaagaagaggggaacgaggatccaaaccagtacttgaacgaggaagagaacgtggagagggatgcggaggggaaccaggaggggcacgtggagagggatgtggaggggaaccaggaggaggaggctagtggaagtcaaccctccgctggacagaagagggcacgcgggcaacgaggtgccgcgaagaagcttgagggtcggcacatcataacggaagtggacgaagacggccgacctagtgccccggtggaagcagccaagaactacgtacatcacagcggttgggttgtgcgggataacgtgcctgtcagtatggtgtactggcgcagaacaagggcatgcggagatcatgagagctttgtcccagattcggagaaagagatgctatggaccacaatgctcgagacattcacccttcccgcgggtacagaggacaaagtgaaaaggtggactctaaagaaaatggcagaacaatttcagagcttcaagggagatctgtaccagaaatatatcctgaaggggcagacaccgaacttcgacacattcccaaagctaagggatcactgggacgagttcgttgcatatcagacaggtcaacaagggcaggcgatgatggaaagaaacaaagaaaatgccgccaagaagaagtaccatcaccagttggggtcaggcggctatagcgtcgcgatgccgaagtgggaggagatggaggcaagcttgcttgagaggggtatcgaaccggccaccgctaattggccggatcgatcaaagttctggtactatgctcacggtggaacgctcaacccagctgatggctctctggtcttcagcgatcagatacgcgaggctgcgcatcgactaacggacgtagtggaagcctcttcttagggcacgttccgacccgacagagagaaggacgagctgtcactcgccctgcagactccagagcatccaggacgaacacgagggaaaggggttgtcacatcctgatttttgtttcaggatttataaattatttaataaattattattagaatttatattaaatgttctttaatttacaagtgaagttaaatgtgggaaataaaatttcctaaatataaagcatggatggatttaatttttattaaattctccatggttaattatactctctggaattttctcggatttttcggagctcaattcctaattttaatcatacaaagagcatttcagtaattacccacatattaaattaatcattaaatggtctaattgtaattttttaagtactttgagtgtccaagtattttcaggatttttcttgaaattatttgagcattggaagtatttttaataattcaaagatcatttaagtgattattttaattgggaaagtaataaaatcctcctcctcagcttgggccattttcagcccattccttcctttccttcctctctcttccgccggcccaacctgagccgcctcctctcctctcagcctagccggaaaagtctattttccctccctgatctactgttcatcttccagctctggacagagccgagccgcccgtgctgtgccctgtgcagccgccgcctcctccttccaaatctcgcctccccgttgctcctttttccaatttagttgaggggaaatattcctcttatcctcctctatctttacccccaaaaatcggagcaaatcgttgagtatcttatccgaatcgaactcgttttcgagtttatctccaaaaccgagttttttgatttttccggatcgatttcttgcgggaggagtccgatctcttcaatccaaggctataaataggaccccctagtcctcctctttcgtttgccccctctcccgtcctcttccgtgctccgtagctccgtcgccaccgccgccaagcaaaccgccgccgccggccatctccggtgccgccgcgccgccgtctccatcgtcgtcgccggtcgccgtcaccaccgttgggtgcgccgtggtgaggggaagctcggccacccttccttttccgtcgccggtcatcggagctccgccgccccgtgcaacccgagccgccgccgtcgcctcctcgtcgccggccgtcgtcggtcgtcgtttggcacgagggtgagtaccgttgggttcgtctcgtcgtcctctacgtgttcatgtcctccaaagtcgcagccgaccatccaatctccggcgaggtcgccatcttggcccggccattgatgaggtcatcatgacgtcatcatcgtttttctttttcctgttttttctaatagattaaatcttcagaaattcataactaaatcatcgtaactcggttttgagtggttcaagttgctaaattcatctaaaatcatgatctacatgtttgtttactttatatgtattgtttatttggtttttattagtctttttcttcgttttgcgtgttagcttgtcgtttccgtcgttgcgaaggttcgtgagtgcgtcggaagtgatcaagaagattaattgaagaccgattattgcaatgcaagtcacacagatcctaaacacaatcctttgagcatgttgatcctatatttaaattctctatttatttcaactgtgcatttattttcgaatgtcaccgggtggtgtgaacttattcctttgttatggccaatttgcattgattactttattccttgataccttgggttattataacttgactagttgggctttatatattggttcagctagatattagttatgattgcttagccatgcttagaaacattagcacactattgggataacttatgactcactattatttaaggatggcttaatgatagttcacgatggttaatcgtgattggttaattaattacttgccaactaaaacttgataatggtgggttgtgagcacatggttttgagagtcgtgctcatgacaattaaggaccggttcgcgagctactgttgtgagacatttaccgtgccaaccacaagccagcgtgggcaacggctttatcgtttgtatagcatgattcattatagtgcgccagactgtgaagtggcgagaagtccacgggggtcgctggggagtccatgccttgtttataagggggtgattatgatccaggaacggtgcactgtggtgagttgtgttatgcaaggggtattgtcacagctcctttccgaggtaccgtggtggtactgaggcacatggtgacatgatgtggagctgtgtcttgtgggtacagtggtacacctctggccagagtaaaactattcgaatagccgtgcccgcggttatgggcgggttgagcaatgtttttcgtgattagtctcacacctctcacaataattatggatgttaatacctgataataatttgcttagctcctggtttggagttagatctgtacagccgggtatggttgttcaggatggttgggcctgtacagcatgggtgtgctgttcagtgttgattaaaatttttaattaattactctactgttttactactcttaactctttgctaaatgctgctttcgcaaatgagcctatattatgccatcctttggtatccttgtgcacttgcatatttgctgtgtggcttgttgagtatgtcatatgctcattcttgcaataatcatcaaacctcagttgaagataaaggatccagaaggagaagacgtttggcttataccccagttgagctgcctgtgggagtggagctgaagccatcgctagaccgttaattccgctgctgttttcttttcttttgtaagtatgtaacgtcattattaagatggatttgtatattaaattgtcagtttgtgtacctcggctgattcctggacgaggattttatgcacaaattagttcggaaattactagtgaatttcccggcgtgacaggggtgattccttggaagattgggttcaaggaggacatccacacatacaggagtcggatgaggagcaagagagataccgaggcgaagattgcagatcttgagtacaaggtattgagctacgagcttagcatgcaagaggaggtggcaaggaaggttgatgaacgcatggccgcacatcggtcccatgatccccagccgaccattcctcctgcaattgtgagcccttctggaaatcgtagcagttgcgccttaacggggcaggtagtatcacagagcatggacaccatgcaaacccatgatgaaaccacctgccccgttgatgacatcactcagcggacaccatgtgagctgcatattcccttcaagaacttatcaataaaggtaagctcgtagtttatcgattttagatttgtccattccgcaagttgctgcttatatatgttgattactaataaataacctctcaccacgtgaaagtggcgtcgggcatggccatcccaacggacccttcaggtacttaccactgcaggccgattctagcaggatactccaaggtcgaagttgagttgatcgaaggcgcgtacgaggacctcgagttggattaccctggaggagacggtgagacgcatctacgagacacaagccacaccattatactatggcgcaagcaatacatcatcatccctgggcgacaagcggcgtctcgtgcaccatctcctccggctccgccatctcctcctcaggcttcagcaccgtctcctcctcatgctccagcaccgtctccacctcaggctcctgcaatgactcctcctcaggctcctgcaccgactcctcctcaagctcctcgtccagcaccttccaagtcaagggccccccaagctccaccgcctgcccccacaagggcaacgaagaaggcgaaagttgacaccgccaagaataaggacccggggtacgattgcacgcaagaggagcttgacgcttatgtgtcatcagaagtcaggagacaattgaagcctcgaagtccagaaaagaagatttctatagacccgagtgtcaagaacttctttaggggtatgtctgcacctgccaaggaggccataaagctatcggactatgagcgaacactcaagaaagcatcttctggaaagtccaaaccagtccctcagcttggagagcaaccaaaccaggagatcgagccgttggtgaccggtgaagattttggaatacaagaatttattaatgacaccgggctaactgtggatcaattgctacgaggcgcaccaatcgaaaaggcggaagcgaaatacatgtacgaactcggtaaaccgcttgtcaagcctgagcagctgcagtccctacccacacaaatatacaagttccatcaactgtacatggagatgagcaccaccggtagagagatgatcggagcgaggatcagggacacggacttcttgcaaggagatgacattctctggatcaatttcaagggtatctacgaactataccagctggacgccctcgacgtctctattatgagttgctggattttgtaagtatcgttcagttagatttcttattacgtttcctttaattaattaggtccttgtgtataagtagactatatataatatatacttccttttatcgttgtagaatggagattcaaagggcccgacggcggagggttttcgatactggattcatcgaccctcggaaagtaaacgtcgcaatgcttgaccagtatccgcaagccacataggacaatctcgtccatctcctgatggcgtagcattacaagacgttcatactgttgccgtacaacatagagttagtttaattttactgtcttcctataccaaatttcattcccgtaagaacatgctaagtgtttcatacgtaatgcatcccacgcacattgcagattcccctgggtgcttttactcttcgacctggaggcctgcaccgtcaacgtatatgactcaatggataaaaaagagtctacgtttgacaaggttttcgaacttatagacaggtactgtcataagttcctatgttaattaagaatcttgttatagttaattgctactacgaatcatagctttaaactccatgtagggcttggtatcggttccgtcatttggtccgcggcaaatggagagaaagacttaggcggaagttcaattttcctgtgagtacacatgctctacatttatattgaatctccaattcaaatacatacaagtgtatattaattagatctctcgccatttgtcatttatttatagtgcgcaaagcaaaagcagggaactaacttgtgcggctactacgtgtgcgaatattgccactgccttgcagaccaaatcatcaccacaagagagctcgatgtacgtacaaataaattcaaaatttcattacgtatcgatttgttgtttaattactaattaatttcatacattcatatagtttattcgcatgagggataacctgatcacacacaaggaatttatcgcggtggttcaagaacaactcatgggattcatcaacgaacaaatccttgatcccaagggtgaattctactacgacggaaatacaattcataggtccttagcttctgagataacgactactactacgtcgaaatcgtagctagctaggacatcataatggattgtaattaatacatgtctgtttttctatatgcatgtgtacacattttctttaatgtatatatatatatatatatatatatatatatatatatatatatatatatatatatataaaccatgcagcaacagggccatgcaaaaaaaaagatcaactcgatctttagtcctggattggtagttccggtttagaaaccaggactaaaagggggttacgaaccgggactacaaacgctttctccaccagtggaagtacattagttatttttttcttatatgattaatatgagtcatatgaagtgtgttgctgagctgcgataatatgttacggcctcatcttttcgcttatgcttatgcttatcagccaaaatttgaattttcaaccttaaaattggaagtgattttggggttattcatcaaagtttaattttcaacctttccttttatatcgctaagaacacatatataaaagttttattcataaattactcttctcttgcaaatatgttgtttggcttattccacgaataagcgaaccaatggggccgttaacttttttctttttctaacgaagaaccacctatgactaaggccctgttgggatcatttagtctctagactaaaattagtttctgaactaaaaacttttgtcacatactgtttggatcaatggactaaaagggactaaaggcatgtagaccgagggagcgagaagagagagattgccactttagtccctaaaagtagctctaagagagactaatggattttagtcctaatatgcacttttagtctcttttagttatccatatttgaattcttagggattaaaatagagtgactaatggattagtcccaccccatcaagggaaaattggaaccatgtcattataattttgtaaaatttgagatatgctatgctgacccacatgtcattgactcatgtgggtcctatttgtcattgtgatactaatggcataactcaaactttgcaaaattataatggtatggttccaaattacccatgaatgaaacaggatctgagtcgatttgcttcaaattgtttgactttccaaacgtcgcaacaaatatgcaacctttgttaggaaacgatacaatgtaaccgatctggaaatttcctgatgacgggcaaatgggcaacccatccagtgagatgtgtgaataagcaccctgtgcacataatctggagccgtgctgccaaaaaaaaaaacaaaagaaggggacagtgacaagaaaaacgcacatgttgatggcgaaaaaaggtcctagaaaaaccaggcctgtagacgagaaaggaggcaccaggggcgaagctatagcaagttattggggtcagttgaccccgatgatttcttccgagtcccttatactcctttctattttacagctatgaccggtcaaagaaaacactagaccccgatgattgtttcgttaaagctcaactggtggcaagaaacgatactattatcagctagcaaatagaaaattagttagcaattgtgattatatgtcagtctacatagatatatatatacgttttagactggcgctcataaagtgacccttatttaggattaattgctccagtagccaactaatcctattattatttcttgattatcatcacaatttggttgaacctagtctcttaagtctgaatttgaggaaattagagttttgaaatataaacgtttgatttttcaagttcagttacatgatcatgaggcatgagccgggggaatataacaaaggtgattttcaccatataagaggttgttatattcttttcccaaatatagtaatctagtacaataacgatgtggttgtaattgagtccctgtttagttcctacacaaaaaatttacaccatatcacatcgaacgtttaacacctgcatgaagtattaaatataggctaaaaattaactaattgcacatattgcgactaatttgtgagacgaatcttttaagcctaattgctccatgatttgataatgttgtgctacggtagacactttctaatgacagattaattaggcttaataaattcgtctcgttgtttactgacggattatgtaattaattttttttattagtgcccgatcaccccatgtgataccctatataatatccgatgtgacatgccaaaactttacacccctaatctaaacaccccctgatatgtaaaaggtaaccactactacaacaataaccttaaaattattagaagctatagccaattgttaggatcgttaattaatagtgaccccggtgacaacctatcctggcttcgcccctgggaggcactcaggcacatgcgtcctggttcccacatgcacgccgcgtgaactcaaactcgtcgcaaaagaaaaaacagagcaaatctatcatcacttggcgccgatcatcccgagttcccgacagcgatcatggattcatggttcacgatggccagggcactccatctcaaaaagaaaaaaaaattaacagaaagatcaaaagagaggaagaaaaattatcgtgattctgtgttcatgcattggcaatcaagccaatcgtacaccatgttttcctatctactgtagctaggttgcaaaattatcgtttacatgtatcgtctcaattcaagtttatagctaccaagtttgagctttacacttactagtagtagcataataaaccgcgccgcccgttgctagctgacacctgcaagagtgccagtgagtatatactagtactactacggcagtaacctatgagccgtttgctacaggcgaaaccgagccagccctcttgcgagactgcgacgcgcgcgatcgtcaatcatgcagacgatcgatcacatgcgtgatcgcgctggacatctgaccgttcaccgtcgtcgtcgtctggccctgccacatgacatgcatgcgccacgcacgacaacccattccttcctctcgctgtcctgccgtgccctgcctcccttatccaacaagcgtaatcgatcgatcgatccatccatgtctctgcatccgggtagtgggtacaaataagctgaggccttctcgcgagaaatcaaaaccgtatcacctcacactcacagcagttcggctgaccatggcgagagcggcggcggcggcggccttcgtcttcgtctccctcgccctcctctgcgacgccagccaaggtgattgaaattgctaattatagtactagcattacttggcacttgatagttgctgcattgtcattgcagtgctaatataaacgaattgtgggcgtgcaggcgaaggggcggcggcggcggcggcgtgcagggcggcggatttggtggtgaggcagagggcgacggggcgggtggtggaggggaagccggagtacgcggtggaggtggcgaaccggtgccggtgcgcgcagtcgagggtggtgctgcgatgctacgggctcagcagcgtcgagtcggtggacccgcgcgccatccgccccgtcgatgacgagcgctgcgtgctccgcggtggccgcgtcatccgccgcggcgcgccgcccgtgcgcttcacctacgcctggatgacgcccttcgacttccccctcgtaagctcgcaggtccactgctagtgcttagctagcctagcaagcactgtcacccactctatcatcagctcgtcgtcaaaacggcagaagcgaaaatgaattagctagtgcagagtgtatcatatgtaaaccccagtactgcaccgtgttagtgctgggtaatttcaaacttctgatattgtttttggttttggaaaaaagaagggggaagcagtggagcaccctccagaactgtttgtgatcaactaagttaaaatcagaccatcaattgcacttagctagtagcacaaattggagttttcctttttgagatggacactggaattggacgagctcttcttgctcctgtaatctcctaggcgtccagctttgttaatttctacggtaaaaattggttaaggatttcaactagttgggtacaaagtttgggcaagtattgtcgccaccaagctgttgacatgtgttcctgcagtatatatgcttcacaaattggagatgattatattcgtgaaaatgctcaaatgaaaaagaaaactacagtccaatttggaaataacccagacttgccagttgccacgcgagaccggtctgactagccaccaacgacatttggccagtcaaactgacatagtctgactccaagtctgatttgtggtgctcgatttttcttgcttaggcctgagatttttagagtcctaactggtttccacacctaattggatatgaaaaaaaccctcagaagtaagtccaccctcctataaatataaggggtctaagtccgattgaaacaacaaccaatcaatcgtcaaaatcaatttagtatccaaaccttcttatatattctacatctcactcattcttgctacctatcccaagtttatcgttctcaaatccaccaattgctcgtcgtctctcatctctacggtgttagaggacgccctagtgttgaagcgaaaaacacacactggctaggaagatctacttaacttcagtacagatccaaaatcttgcctttaggtttatgagcgtgccagttgatttgaacctgcaaacaacaagaaacaaagacaaaaaaaaccgcggttaaatccataaacgatagccgatcggctagtcgccgatggcatatcatttatcttcaagacgatgtgaatcgatcggcagctatgaataagcaagataagactaaatctattcgatcggctgtagatattaacgctatataatcagtatgtcgatgtatatttagatcaagtgattgggatagattggtcgccatgccgagacagtataaatcatttaggtcgaaatatatattaacataaagattataaacgcttatagcatagccgatcagatagatttagcatgtattggcaaatactccgataccactctatattaagatattaaaacagatagaatataccacacagaagcctaatatactttattgtaacaagatcttaatataaagggcagatttagcatatcaattaagcatataagacataaagctaaatcaggtaaaatcggctgaaacctcaatactatctctcttgatgattataaaacaagccagatatcataattataaaaactacttaatagatcgaactcaaccgatgcagcattaagcataaagacaaatatgagatctaagcaagatgatcaaaatctgcaagagatggtggatacacgatacaatctagattaataacaaaacataactctaccaattgtttcctaacaataagaactagccgataacaagttatatagcacaactagtatagattgcagcatgtatatgataactcgacggattacatgaacagggttaaagtatcataaagatggaagcattaaccccgataacgcaagccgccataacaagttttacctctagttgaagatcgaatcgatgcagctcaacccgaaagcaagaactcatcgaaataaacgaaagtaaaaagggtggcgatgcgccgagattgtattgaacgattgttaattgattacatgggttcgggtcatatttatacccgagatacaaaatatgtccttgccggacacgacacttatctctaacaaactctaagataccataagcctttgcggcagacttttgtccaaacatatctctaaggaaattacatgaaatatcctaactaatagatacaattgccttatccgagagctttatctccatcatggcaatcctcatgaagcactttgaacgattctggaaacagcttcgaaaccgtcttcatcggaatcagctgcatcacctccatcggctgtatcggctatcctctgtccgatccatctcagccgatgtagactccagccgatgccttcgcagccgattcacgctctgttcttcgaatcgatctctttatcgaatccgcttcgatcccaatgtcgaacctggttcacatcttaccaaatttggtcgtcaacacctagctagcctgccgagtctagaataaaccgacgctcgttcaccttgatggggtccctcccgggtgttcgttaggcggcatctacccactccctatggcggcgtgtttccgggtgctaccgtgggttgcacatcacatgcttaatgtgtggcggcgttattctacttcaacaacttgactattattataagaaatgtcacaaagcatggtgcgtgtcttctatatgatggtctgaaaaatataacaaagatacatcagaaatcaccgcacctttcgtggtataagtaggaaataatgggtatgagaaggcaaattcgccaaaacatgggcatggcaaagatgatgattatagcgaattaaaaagtatggtcaattactacctggcatatctcaattctcacacacacatagtgtcgatctcttggatgtcatgttgtacctaactacagatctataatttgcttttcttctctctccacatatctccttcacctaaatacaaatatgatataacaattttaaaatgccacttatacattacttattgtaggaataagtccattttgcctcccttaactattgcttgtgattaaattctccctcaatcacagaatcagatataacgcctcccccatttttaaaaaccagtgtaaattgactccttcggtggttttaaaagcggtttctattgacgtggcaagcagggccccacatgtcaggcacctctcttccatcaaccaaaccaccaccttttagagcttagagaaacatcacttttccctctcacatctccaaacagggcaccgccaagctggccgttttccccagcgccgccattgcacgtcgcacctggagagcgccacctcgccgccgccccttaggccttaatcataaaatgtttcaaataagactaatggttaaacgttagatataaacagtacaaaacttcaatctggatggaggtagtacgatggaggtagggcatctgcatgttgcacttgaaaagatcagtttctacctgtttattttagttgtgcatgcatttaatatgaaccaccagttggcatgtaggtcttctgtttttagcatttttcagtgcgattctaccgtgtgtttggttctgggactagatgggatgtgatgaaaccatccctaattttatggttgggatgattccactcgcgtgattggattgtaggataggacgatcctagttttttgtttggttgaagggatgagggagggatgggatggacgccgtttgcaactactgacgatagttgacaaggcgaagcagcgcgactacagcccggcgggcgagcaagcaaaccggcgacgagaaggtggaggagcggcgtgagtaagtgagcaggaggagcaaccatggccaccgccgcctctgtcctcacctccctctccgccatcgcggctgccgggaagagcctctgtcacatccagaaattctacaactcgaatttcaagctgaatgtgtattaaacttctatccaggaccagccaaagtacacaaacgacaatttgatacaattccacgactatataaaataaactcacaaacgcagcggaaaaacaaaagaactagacttaatcttctcggcaaaagcgaagttttctccataatccacaggcaaaaccttgacgtctggaacaagctcaatccttagagaactcaccatctaaaccaatctctacttctgtggtgagggagaaataaagtaagatcgagtacaaccaccgtactcaacaagtcatatcaacggggaggcatgatgcaaggatattcaaatgaatggctcataggataatttgtagtaaaagtagcatttataaatcataatttgaaagcagtaaaaacagtatataattaggtagtattaacatgaacactgttcaacgctaaaaccacgttgcaataggcccaatcaaaaccacatgaactacaccagttcattaagtcaaattattaagatgagactaatcacggtgagctggttgaccgcccaataaccgcgggcacggctattcaaatagttttactctgatcagatatgtacagctttacccacaagacacgattctacacatgttacatgccccgaagtatcaccgtgatactgcaaagggggaaatcgtgacaaaaccctccatataacctcccctaaccaacatactcacctcaggtttcaccccacccctaaacaggcagtgggcagtcccctctcgtgcctaggtaaatccggaagcagcatagaccgcttcccggtccatccatactccatcacgcccacccttgccatggtatgttaactagaaaatattatactttagatttagcctggagcccatctggcctgtggtcaatacgagtatatcttccagggattcccgagaaccggtccttaattgtcatgtgcacgacttccaaaatcaatcatgcattgtacccacaacccaccattaaagcatattttagtttaattaaaccagaaccatggtggtacatcataacataattaaggactaaattataatgaatcccattgtgagctaattggtctaagcatggctaagcattcctaaaccaatcatctagtcaattataacccaagctgtcaatggcatgatataatcaacaggctgagaataatagaaacattctaaacccaatgcaatttaatagaaaggaggggattttgtaaaataggctcaatatgatcaatgatgtatgtatgacttgccttgctcttgaactgacggaacctcggcgaccacttcaaaataaactggagcatcggaacagccggaatctaaatgacacacaaagcacacaagcaatacacataataaggctactaaaatatcaaaagaaaccaattttaatggattctatacattttaacgaattcactgcaatttgaacgggttaaaacggagctcagaatatttagatatgaatttacaagatgaactgtgttattactagtaaccgaaaaaccttagtcatttattacatattattgcccaaagataaaatagatcaaaggggaaattaacatcgataagcaagcctcacgagataccaactcatcgtgtcacgggaccatccaaacggtcaaccaaaccggtggctcaggacggttctaaactaaagaatgacttgaacgaccgaatgaactaaagcttcggtcaaactacgaacgaacagcggctagcggcttagcggcacggcaagacgtcggcacacgggtagggcggctcggctcggcttggcagcggtgcggcacggtggcggcaacggtggcacagcagtgacggctaggcagcgacacggcagtggcagctgggcggcggcacggcagtggcagcggcggctaggcggaacgaggcagcgtcaacggtggctacctgcggcggctagggctagggtagcggcacggcaacgacacggcggcgcaagccaacaaaagtgaaggaacaactagccctaaaaacaagacagaagcctcaccggagaggagatgatggcggcggcggttctggcggcgagctcaggatcgacgacgacgacgctagataggattgaacggaaaagattagatagatgaattgatgtttgcaacaactaaaacatccatgggaagggagaacagagtaccggcgatgcaacggcggcgatggcggcggcactgacgagtggcggcgggacagcgtcgactagcgacgacgacaggggagggacggccgatggctagggtttgggttttgcaactatgtgggaaaacaaggaaaatagagggggtatgaatacttttatagggggcaaaaatagatggattaggtgggacctactgggactcggattgggagagggggagagaggcggttcggccggctagggggaggggcacgcggggggagagagggggaaaaaaagaaagggattaggataaggactttcccaaaaagaaaaacaaatgcggtgctgttttaggaaaagaacagaaacgcccccgcgaatgaaaacaaatacggttcgccatgcaaaacaaaaccgcggacagagaggggagtgaatcgggcaagattcatgaccaaaggcgaaaagaagaattattattaactcaaaatttgacaaattaaattaaccacattgcctccggtgctctgaatattccgctttaagtcctgttaatgattttagagcaaagagaattcgaaaaaatttctccccaacaattccgattgtttaatgcattgttaatttggatttcctcctggttaaccaaagtaatttctatagacgatttattaatgatttagaaactacggaaaaggggaaaactccgggtgtgacagcctcctcttgtcctccccctccccctggctccctctccctctccttcgcctcccgcggccgcgtcgccgtcaggccccacctccgcgcttgtgtcttgtccgctgcgccgaggagggtgttgtcggcctcggccccgatagcggccaccatcgcagtcaggcacaagctcctcaacacgatgctctcctacttcgagttgctcgacgaccgtgagggcggagcgagtcgaccagagcccgcacgacggatccggagatcccctgcgtcggatccaatgtagcaacggggctcacgctgtgcgcccatcccatgtgggacaagttcgtccgctcgaatttgtcggacagcctcgacccggatataaggggaagtttcatctaacaggatcatctcatcccatctaacggaaaaacgggttcgccctgtcccaacccattccatcccaccaaccaaacatcacccaagcatacaaagaaaaaagggtagcacccaaaagattgttgaatagtcccacattggttatggaagggcaaaggacctaagatataagtgggggagcccctcacctcaatggctagcttttggggtgggaaaggccatttacgatcctacaattggtatcagagcctggctaggttaacatctctggcccaatggacacaatgtgtgaaggcctgatggatcgtaggtgcctgcggagcccgtatacctaatggaccgtgggtgtgggggcccgtatacggtgaagggctgagggacaccaatgtgtgaagggggagattgtcgaatagttccacattggttgtggaaggagggggagattgtcgaatagttccacattggttgtggaagggcaaatcaatagctagcttttggggtgggaaaggcccttaccaatgtgtgaaggggtgagaaaggcccttaccaatgtgtgaaggagaagattgttgaatagtcccacattgattgtggaaggacaaatcaatagctagtttttggggtgggaaatgccatttacgatcctacaatacctctgtaaactctcattgtcattgacacgtaatttacctcctttactttttattcaaactttctatacttttagtttggtcctttagactatatactatatgttttttatgtgccaatttttttttataatgatagtttatgggatatagaccaaaacatgaatgaagacgaatgccattggtaaatagtatatatatactggacttcaattgatccgggcagcgcggcattgtgcgcttcagctagtactaccaaaaccaaaacaaatagcagcttggagaaacacagtctgacttgtctaaagtagaaaccaatactaccaaaaccaaaacaaatagcagcttggagaagcacagtctaacttgtctaaagtagaaaccaaacagtacactgatcatatcagtaattcccaaatttaacttgagataaacaaaacacaaaagaagtggtggtctggaaatcactggaagtcatcttgggcatagatagcagcttcagaatacctgtggtcacttctagtttgtcagcaattccgcttgttcagcttcataaacctttgtagcctcccctatcaaggtggccaagagctttcgcttttcaatcctttgttgatacaaaaataccatttcttcatggattctcttggaagtgcgcttttttatccaaatgccatattttggtgcatcagttaccagcttagatagcacatctggtgaaaacatctgaaattaaaatgctttggcccattagttgaatgaaaagttaccatcagatgtgctggaacacaacaaaaaaataattacgatttaccttttgactgtattctataacttcccttctagggtaagatgctatcagcaaatctgtagaatgtttcagcaagcatgctatgatcttttcttcagggtaacatactatcatcagagctgtagaaagtttcaacaggccccaatcctcactgttaatgctagagatatccataaggttccgaccagcacgacgcaaggaccaattatttttcttctcacaatcatcacaatcatacaagtcagatgctgcctcaagaatacgtttgttaacctggaaacaaagggtatcatttcgtcagtaatagggaaaaactcaaatgaaaacttttatataaaaattaacaccaacggtaaatgaaggtttcaaatgcacaatgaacaaactataagagtgtaactagtagtaagctcaccatccctggtttgacatcaaatccataacgattcaggagcatttttaatccttgactcatctggagacggtcctccttactcagctgagagttttcttcagggactaaactatgcataagattcgtcaaaccccacatcacctccatcacaaattcatcatacagacaggaaataccctgaaaataatgtaaataaaaaatgcagctcagaacaaatgatgcaacaaataaaaaatgcagctcagaacaaatgatgcaacaaagtagggagcttgcactaaccaggtttgcttctatgattgttttatattcgggtttcccaacagctattttcccccctttgcggtggtactttgttatcatgagattaagctgatcgtccacaccagtatcacagttaattgccagagacttgtctgtaaaaacttgaaaagcaagacgccaaactacctgataaagaaacaaacagggatgagcatgttaatggcgggaaaaaacaattatcagttagcaatatatgtttgatgcaatgtaatgcatctcaatctgatacaattgggagctttaagtgttcatctatcaaattgttgcggttcaattcagaattaagaccatgggctaatgtgacatgtttcaaaaatgtggtgctctttggtttcaaagtggtgcgtaccaaatgcccctataggtttcaccttgctccaatcgacttttaagaaacctttttgttaccatgcttttaggaacatgctttacaaacattctattgatttcgtcagttagaaaaatataaatcatgcggtactccaacttttaacttaatatcaatccagaatggcaatatttgaatgccaccaaatctgatttggccctccaatggtggcgtagaacatcacaagatttgaaccttaactgggcttctaggaggctaggcagggtcggaatacacttggttgatcactatccccaccaccttgcagtttcaagtggaggcacgaacatatgctccagatgaagagcaggaaatgctggtcagggtgcaacctatcccacaacctggaagagaatcggtaagaccgatgatatgttgatggtaaaggtccatcaagatcaatcatgcggctgctattcctaagcaagctaaaccaagttcctaatttgttggctacatggcttatggattggcatagtgttgatcctagtctgagaatctaccagggaagcaggtgaaattggttggtttctttaacaagttcgactagaatcgcaggattggagtcaaatccaatggtaatgatccttttctcatgatattttcaatcaaaggtcagactagattatctatcgttggaagaaactacacaactgtcatgctctacaatggtcccttgcagccactgctgaaggcaagctatgcaactgtctgggctactactacaggacctatttgaaatcggctatgctctaggagctgtctggagggaagcacagtgccttcattccctctgttgctgagctcaatttctgtgctctacttcaagctggaaggcattgtggcctggctaaggatagttcaggcaaggtgagaataaatcaacccaaacattggaacatcagataaaggtagagacgagtttgaagatgcagagaagtgaggaagatagaatctcatttgccccagggctggtcagatggatttagtgactacatgccgttaatctttctttgtttttctttttcttctcatttgttgttgttgttctaaacttatgcacttttcagagtttaaaaaggcaaggaaataactgatgaacaatgatgttatggtaaaatccatccattcaatgcaaaataaataagtcgagtcacggacgagcaacccatagaaaaaatatataatcagaaggaaacgaaaggacttacaaattttgccctatattccatggcaaagttttgccagatatcctgcagagagaaatcaaatttaaaatcagatccatgaccaaaatgcagcacatcagtctatataacaaagggaaggataacgagcacatgcctccatggcagttggtgcgatgaggcggatcccatcaaaagagaaaattgcaaagcccgatggcgtctcaaacagcagcaagattgccccgccgttccccgatctagcatctgtcgaaacaggagtcaacaaggaaacaaactcagcctagtattaccaaggaaaaaaaaaagcattcaccgatgaaggggaaggggaaagagcaagatccaacacggccgccagccccatcggccgcgcatacccccgcgcctcacctatatcgccaataacgtcattctggatcgatatgcgcggacgcttgcgtgggtttgttgagggtggagcacgacgatcgcgtggccgtaatgagtaatgaccggaggctgcgaacgggggtggatcatctgtaccggcgggcgagtccatggagaagctgtgcgagcgaggagaaggagaaaccacgaaaccgaacacataaataaaagcgaggagaatccgaacaggatcgggacgaaaggcggcggacggtgggagaaggaaacacgactttgttttgagaatttaaacaactcaatgtctaacctttccactcaatgacatactcgatccgtataaaagtcgtttaggaccgcgacacggttttcaaaatacaactttgacttcttatttctataaaaatatttattaaaaagtgatatatgtatatttttataaaagtatttttcaagacaaatctattcatataatttttacattttcaaactcaacaactcgatagttatttatgatttatatttttaaggtttgacttaaacattgtcctaaacgacttcctttacgagtatggagggagtatgggcctagaactgtggcttggttcaaacctaggaacctttttgcatattggtctcactgacctgtggacccaacctatttaaaatttggaaaaaatctaaatgaagtacctaaagcttttatattttcaacagaaaaacatgtaaacttctaaaaaccataacaaattgaaaacaacacattttagagtaaatcaaatttctgtgaactcatcaaattatgaactttaatgttatggaataaaaacttggcactcacagtacaaattttgcctctaaaactcatctaaactaaatcacacataaggcttgcacaaacttataaaatgcatagagaattcaatttaagtcattttggaacaaactcagtttctatagatccaccaacttatgttcttctataaagtaaaataaaatagtatacgtacttcacatcaaatgcccctaaaaatactatctacaaaatgattagttttagataagctgaactttagaaattcatataaaatgcatttcaactcctttttttagtaaatttaagctcggtagaaatcacacccaaatcgataaaaccacatgctgcaggggacaaaatgggaagggaatgaatgggggagggatgaggtgtacctgcacatattcagttccggccaaccaaaacgacagctgcgaagccctagagcggagcccaaccttgccgccccctgcatcgcctttctggttgccccaacttgtctagggttttagtcggtttggaagcatgcacgattgagagagtgaggggggagcgcatccgtgttgaccagggttgttgaaacccgtgctgactcaacttgttgaccagaaaccaccccacaatattattatggtagttgttttgtaccggtttaaataattgagggatgtgaaatactcggttggagggctccaatcatactcggcccatggtcgagggagtcaaatatacttttttccttatggatttattgaccccgagaaggcttaaaaatctgacccatcatgtacaaggccttgagtagattgggcctccagctagaaagcataaagtgggcctagtcttgccaagggccgtgggctgggctcccaagttgaaaacaacgaaaccaagggaccgggatgcaaaatgatgagacggtggcagcgcgcgggaaaacccccgcctcgccgccccggacttggcgcccatttcatttcgccgccccacccaaaacccaaatctgatctagggttccttccttctccccgttcccccccacacacaacagcacgagcggaggctgcagagccgagcggcgcaggcgattctcctcctctccccgcgccccgcgtaccgcgcgcgcgcgctggggagcatgggcggcggcggtggcggcgatggtcggcggcggaggccgtcggccggaggaggaggagggggagggggaaggggaggcggttggaggtctgggtcgtcggcggcgaaggaccagcggctgcggctcggagcggaggagctcctggagagcaggcttggctttgcgccctacaccgacagcgagcgccggctcggatggctcctgaccttctccccggtaagccctctctctgggattatttctagcttgaattgggagtgagtgtcatctggaaactagcggcataactttgtaaatgttgggacctgcttctgactttgaagtggaatatgactggagaaatgggtcgatcagtcggagtatgcagaccaggaaattcgggagcctccttttgttttagttcagtaagcagtaggtgaaatcactgagcaatgccggtggtgagttgctgctaacgttggtctagcacgttgatttgccaggtgggtgtggtgggggatgtttgtcaaatgctgtcacagactgcaactaatagcaacagtcaatcctttgacgcttctagatgctcgtgggataatttgtgacacagttataatgtttctttttttggtaaaaaaaataaagtagctacatcatggagaagttgtttcttaaacgattctccaatacaatctcttgacaatatgataaaaactgtgctgctgttgccatatctggtggaaccaatgaacgcccgcactgaatggatacacctattaagcttggtggtccatccacgttatggacagatccgtagaaattggacaagattattaagttaatctctcactgttttgcaaaatgtaatcaactacctttttgtgactttcttgattcacctcaaatacctgcagtcatcatgggaggatgaggacactgggaagatatacagctgtgttgacctatacttcgtgtcccaggtaaattgcagttatggcaaaaaaaaaacttttgatttgtcacgtctaatcgtgtatgctttcttgcaggacggttctacatttaaagtgaaatacaaatttcccccttacttttatgctgcgactaaggtgagcttgagcttgtgtttgaatcataagatgacttttagtttctccgttgcttgatgtttcttttcagatatcatattttggaattttaaaatgtcgcaggataagatggagttagaagtcgaggcatatctcaggcgacgttatgaaggcgacattgctgacatagaaattattgagaaagaagatcttgatctagtatgtgccttgctttgaatgtttaattcactacattttctttgcatcagtaaatgctattgttgtgataaatttggatggttaagagttttgatcttgttaagagttcttcacctgtgatttcttttgtccttttaccttagctgtttgttgtagaagaatgatcatgtatgcaccattgcacccttaagatcccacacacttcatgtacagtgcttaggattacaattggacaataatgcatattcacataagattatgcactcagactcgtattaggctctaacttaacatcaacaattcccctaagtggttttctactcctgtttaagcacctacacctgctctgcatctctaccatcaccattatatttataacttccatcatatgaccataacctctggtacttggccatgcgattcttccaccagtagggcttcacctccaatgccaagttcaccaccatgaacatatttttctgcatgtctcccacaatcttgacgatctgctaagcatcaatcattcattcccatgatagtactggccatagtatcacaaaccaatatgatcaagcaccaaatagcaacgcagataataccatacactgggaacagcaaagcacattacatgtcctcaattgacttcacctgatctaacaagtagcactatcagaacatcatggagcacagatccttcccttcctgtctattcctctttctccctcttgggtaaagcaataactgatgaggctgcacagctttcctgtgaacagttcaaaccaacagcatcaaccatccccagtctccgccacagagcacatgtctctatggaggattttgtaacatcctgaaaatcctgataataataatacgtaaaatcttgatctttttaaaaaccagggccgacagattaggccaaaaatcaagcagtagcagctgacttgatctcctgcttgctgtgcttggtgacttggtctagcatgttacagctgtggtgacctgctcccacattacattgtggtggttgggtatgacctaaccacatcaatgtcagtgacaagcaattcatgctgggagccaacagtaacctggttgaggagtatgtcatggacaacgatggttaagagtttggcagaaagttgacaatgatgacttgtggggttgaaacttcatttttagtgaaaggggctgaaactttatggtgagttagggttgggacccacctttgataccatgtaggaatttgggaaaataatttagtgttgtacttggaaccccactctattaatagtgttggctctaaaactaggatagacattcactcatagcatgaacagagagcaagagaaaagagtatagcaaaggagctacattttcactgatctcactggcatgcccaagacctttgttacatagggatatatgtctttctataggacttttaacttggtttctacagtaaccgacctgctacagttacacaatattacagctcatgttacaactcatctaacagctcaaaactagctatgctacataatattggaactaattagtagtgaagttccttctttctctttgaaacacaacatagctccaacctatacaccgctagctagtaaatttccattttgattactccatgcatgctgacataggttttatacagatagctgatcaccaatcctctagtacttgcatgttctagttagttctagtgaaatcttgaagcaattcacttagtctacatgcattttaccttagtcaaattaaatttgacttcttctcaagaaaacaaattaattttccaacaaatagtacttaggattacagctggactctagtatggatccatatggagcttttgactttgactagaagtaacactctaacttgtcaaatacccatgcatttcattgaatctcaaataaacatattatatgtttatcttcaaatttttatttaaatcctagaagaaaacttatctaatttgtaacaaacaatatcaatccataataacattattacaagcacaggcttacaaacgacatacacaaatgatatacttattatcctcgggagatccaaccagctcaaaggtggtggaggaatgcatagcgaccgccaccactagcttcttttatatagtagagagactaacacttgttatggtagagtaagattcatgggttgggtggtccctgaaagctttgaatagactggtttcaccaatgtgccaatgttcttattcatatgccattttttattatctagatttgattgggccaattctggaaggtaattataactctctctttgtgtttcagaaaaaccacctttctggtttgaagaggaaatatttgaagatccagtttgataccgtacagcaattaatgcgtgtgagaagtgacctattgcatgttgttgaaaagaatgaagaagaactaaatgctgcagaggcatttgaatcaatttatggtgtaaaaaggtacctgtagagtatagtatccatcgcaacaattatgagctaagatgcttctatatagtatccgtcttaatagttatgggctaagatgctcctatatagtatccacctttttagttatgggctaagatgcttctatgatgtatttaaagctactcttgtttgactctttcccagttaagtttgcggtgaagtaaatttagctgtcatatgtgtttttttagcctatgttctgatgatcttgtacactatgacagggtagaaaggccacaagattacataaattgcatcattgatttgcgtgaatatgatgttccatatcatgttcgttttgctatcgataatggtgagctttttgtttcttgatttgaatttctcacatgcttatttatcactaacacttttgtttctctaaacttatttgcagacgtgaggtgtggacagtggtacgatgttagcgtatctagctctgatgttttgcttcacagaagggaagatctactacagcgtgcagaagttcatgtatgtgcatttgatattgaaaccacgaagctgcctctgaagtttccagatgctgagtatgacactgtaatgatgatctcttacatgattgatgggcaaggatacctgataatcaaccgagaggttccagatgttcttttctctataatcatttatcagatttcagcttactatgttcaaattatggtttacaaacattcttttcctgtattcaccacctgctgcctggcttcaaataagaccgattatctagtactccctccgtttcataatgtaagactttctagcattgctcacatacatataaatgttaatgaatctaaacacatgcatatgtctagatttattaatatctaaatgaatgtaggcaatgctaaaaagtcttatattgtgaaatggaggaagtaataaccaatatgctgtccattttttttttgctccaacttctgaagtgacatgcagttatctttaacctgcgtgagaaaaccctttgtttctttttgtggacttctgtgtgtaaaaaaaatactaaaggccaaaatgttagttgccttgtatacttgccaaatgatttaatgatcaccttgcactcatgatttcagctcgacctacaattcctgattgcaattgcaagatgcaagttttctaaaagcagcatgacatattagtttttctgttccatgcagtgtgtaggggaagatattgaagatttggagtatacacctaaaccagaatttgaggggcattttaaagttaagaatgtcgcaaatgaggtatcaacaaatttttatatttttgttcaataccattttggttttaatacaccctaactacttcgtcaactccttttcattttccctctccatagttggatctactcaaagcttggttttctcacatgcaagaggttaagcctggtatttatgttacatacaacggcgacttttttgactggccatttttggagaagagagctgctcatcatgggattaaaatgaatgaggtaagctgtttatttctccttaggtgtcatttctttaatacgactcatgtagtccaatatcataactatgtaatgagatgtccaaaatcttggccaacaaagtaactgcaaaaaaatattatctaagtcatccacagaccacacttctgcagctaaggcaacaaggactgggatatttttaattgcaccctctgtgctgtctcctttcaaaaaacataaatgctatgtacatatgttttaaatctgcctctgctgtttcctttcaaaaccatgaatactatgcacatgttttaaatttgtttttggtttatatatttcttgaaatgccaaacaatatatgatttcatatcttagttttgtaccctctttgttcttacaggagattggattccaatgtgataataatcaaggcgaatgccgagctaaattttcttgccatcttgactgttttgcttgggtgaagcgagacagttaccttccacaaggaagtcatggtctaaaggtgatacattatttgctgaaagcctaaaagaaaattacttgtttattttgtaactaaatttaagcaactggctatgtctcagaactgaataacatatcaaacttggatttttaaagcaactacataattttgtagtgactgagtatgccaaaaaaaatcagttagtgctttttagataatcagttagaggtaccatttcatttttgttccattatgtgctgcttatccttcttattctgaacaagatgctagtactttcacttttcttgattatttactttccattttcacaatgacaggctgttacaaaagctaagttaggctatgatcctctggaggttaatccagaagatatggttcggtttgcaatggagcagcctcaggtgcctttaagtttgtctatgatgggatagcatcattatcaaatgaaatgttttaaatacatcagcatataacaactaatgcggaatagtatagttgtacaaattctagttgtctttgtttaacctagcattttcagctgttcattttgtgtacccttttgttggcagacaatggcttcttactctgtatcagatgctgttgcaacatactatctatacatgacttacgtccatccatttatcttttcccttgcaaccattatacctatgtcacctgatgaggttttacggaaaggaagtgggacattgtgtgaaatgctgctaatggtccaggtgtgttgactgcttagtaaacttttctgccatgttttctaccttttgagctaatccttgcatctatattctgtcttatgaaacttttcagcttgctgacttcattttcttctgatatataggcattcaaggctaatattatttgtcctaacaagcaccaagctgatctagagaagttctacaataaccgtctattggaaagcgaaacttatattggtggtcatgttgagtgtcttgaaactggtgtatttagatctgatcttcctacgaagttccaacttgaaccgtcagcatgtgaggtatcctgactaatactattctggaagtgatacttaattttagcttaaatatataaatcacagaagagattttctgagcttttttatcttagttacacgttaatgttggctcagattgaaaatttatgcatgcacattagtatattaactcaattgacatttcttttttccagcaactgattgcaaatcttgatcgtgatctgcaatatgccatttccgtagaaggaaaattagatattgattctgtcacaaactacgatgaagtcaaggatgccattaaacagaaggtgttattccagcgctatagctcatatgttgcatgaacaccaagatatttattgttcttctaagttctgactatggaaatattatttcactatgttctgtaatttgtatcgagcttgattgctgtgtcaaatttacagctagtttctttgcgagatcaccctattcgtgaagaatgtccacttatatatcatctggatgttgctgcgatgtatccaaatatcattttgacaaataggctccaggtattctcttgtagtttaataaatactttaaattcagttattatcataatggctgatttgatagttcaactttactttcgtaaagatcaaatgtggtagatactgttaaacatattttccccttccggtatggatctttttaaatcctaactgtgtgcacttgctaacttgtactttgatgagtgacctgtatcgatagtccacataagaagttaaataggccatgatatggtgattgacatggtctaactaactttgctagcatttcttgtcagctagtagtgatttgttattgctatctggttgagttgcagaatctctttgagctctattttgctcagccatcattgccatatatagaaaacacaaagaagtaatactaaatttatgctgctgcattgccaaaatttcatgaaggcactgctgagttacatgccctgaccaatgtgcccaaaagatttaatctgtcagggtaaggcaggctgtctactcatatttcaatcaccactcaagtctaagtcccattcaatcctatgatgtgggttatatgtggtgcggtgccactgggacacaatgcaaactggtctctggagtgcattaacacaataattgatggaggcacaacatagcacctgaattttatactcacaacacaacatacatctattttttttcaaacatcaaaatacatctattgagcctaggcagatcttgaatacttgaaataagggtctctactcatgcttttataccatattgagtttcatgcgcagaccaattcatgggaaggctcaagttgtttaggaaaggtcgttaatgggtccataccagtttgaacttttcttgggtgtttctagtattagttatatggctgttgatgagagtctatgctgatgagacaaataactaaagcctctttgtgtctattggcctaaattatgaaggaattgttttctttaagaacatctggcttcttttttgtacatgattatataacttaaactaacctttgttttttccttaactcttgctgtatcagccaccatccatagttaccgatgtggactgcacagcatgtgatttcaatcgtcctggaaagaattgccttcggacgcttgaatgggtatggcgaggagagacctacatggcaaaaaagaggtatactctaggaatctatatactttgaagttgatatatttactgatctaacaatattctgctttttagtgactatcatcatataaagaggcaaattgagtcagagatgattcaagctggtggggtgacaccttcaaagccttttcttgacctctcaaaaccagagcatttactaaaactgaaggatcgtttgaagaagtactgccaaaaggtgatatattaaaatgcatggattaattaaacctttttggtggcttgcaattactatacttttgtcccaatgcaggcatataaaagagtagttgacaaaccaattacagaagtgaggaacgctggaatatgcatgcgtgaaaattccttctatgtagacacagtacgaaggtccgtctgatgtttattagtatattttagtgtactatgttcattggatagttcatggatatgtaacagtgatttctattttagcttccataatagctcttagtggagcaaagtgcaattttctggttgataaacatagcattgttggctaatgctttcttcaaggtgctctaaaatgtgtactttgtttgaaaattccagctttcgtgatagaaggtatgagtacaaaggtcttaacaaatcatggaaaggaaaactggcagaagcaaaagccaatggaaattctatcaaaattcaggaagcacaggttcacaatgcattattatattatacatcaagaaaattagatcaataccatcacaaatgtgcaatttggaaaatgccatctattataaggatgacatgtggggtctgtggccacatgccagtaacacattggatagtattttccaactaggtgatttttgtgatggtatcaatcaatattattcattttagagttagaggtctatcatgtgtttcaggaattttgagaacttttttgttgctactcctaatgatttttgcaggacatggttgtgctctatgattcgttgcaacttgcccacaagtgtatattgaattcgttttatggatatgttatgcgcaagtaagtgcaatttatatagagaacatactttttgtctttatgtactatgataaggtaatggctagggctttctgatttaggggtgcaagatggtattctatggaaatggctggtgttgttacatatactggtgcaaagattatccaaaatgctcgtctacttgtagacaaaattggaaagccactggaactagatactgatggcatttggtgtgttcttcctggttcttttccagagaactttaccttcaagacaaagtgagtacactagaacaaataaaatggttttcctacaagtaatttgtttataatatatctgagatttcatatttatgctatcattaattttcatgactatctagtgtttctgatgactgttttgattgaagcaatagatgaatgtagagcttgccttgctggactaatgtaacattaatccttatttgtctactttataatgtataaagggctttttcatgacctgaattttgaatttggtgcatatgttagtggcaagatattttagtgtacaactaacatacttctaaatgatcagtgtagttaaagccttaggtgcaaagagaaaaaaagcctgtgccttagactcttgaagtgcaattataaaaacatgaatgtttacccctagcaacgaagcttcttgaagctattatgacaaacaaatagttaagaaatatataatgtgtcgtaatgtgagattagcaaactgcaattgaacaagtcttaggctgctctattatacatagtatacttctttctaagatagatagaacaagtgagtgtgttgttgggccatattttgggcccataggccaatatcccttctctagtttctattctttctacctggcaactagaggaggctggagcgagcttaagccctcaaggcacgcaattcgctaatggtgctgcacctgacactattcaaggcgattcagctgcactgccccttgcttttgggcctgtttgtggggagctttagatcctatgaagcagctggtaggaatctagttggcttctggcttctcgttcattttctagattctgcaactacagcttcttagaatctggacaaaaagctggattgtttaggggagtttataattatgggagaagctgcagctaccaaaagctcttccaaacaggccctttatacctaggcgaccgctttttgtgcttttggctgcgctcaattactactgcttctagtccaaatactaggtagttggtttgacttcgcacattgtccaacacaccggtttgactactcattctcattataacatgctagtaaaacaaaaggttatgtgctagtaaaagaaaaaaggtcttgattctacaaactaaaatatttttttatgagtgatttattttatgtgtccaaatctaaatatggaaaatatgttagtggccaaaatcgaagaatgtttgctcacgtgagtcataaatacattgatttttggactggatgtagacatgtatgtgaactgactaatttatcaaaattaattctaagtggtcatttatgtagtgttcaaggtgaatgctccgatgctaagacttcatatgcaaatctctatgttaacacttgtcactgatgtttcagtgctgggaagaagctcacgatatcctatccctgtgtgatgcttaatgttgatgttgcgagaaacaacactaatgatcaatatcaagtaaggaatacaagtgttattcataaagttattacatatttagaatgtgttattttgcttactgactattggaaagttgttcactgattgatttgtttattatcctaccagacattgaatgacccagtaaataagctatatacaacacacagtgaatgttccattgaatttgaggtagatggaccttacaaggtaaagtactctaatgggatcagtgcttgcgctatacacttttcaagtctgagtagctgatctaatctttgcacaaatgccacaatgcatgctaaaataacaggctatgattctacctgcctctaaagaggaaggggttcttctaaagaaaaggtatgcggtctttaatgaagatggtaccttggcagaacttaaaggttttgaaatcaagcgtagaggtgagctgaagctcatcaaagtttttcaggtatgtgctccctttctgtatcacttgctactagtctttgttgcaaagagggatactgggactttgcactagttagtttggccagtttatttattaattcttatttttctctgtaggcagaggtatttgacagatttcttcatggttcaactttagaggaatgctatacagctgttgcttctgttgctaatcgttggttagacctactggatgtgagtggtttgtaaaattttgaatgatatgctccaaattctaaacaatccaactggattgcattgttaaagtacatttttctattgcagaaccaaggaattgatatttccgacaatgagttgcttgatttcatatctgagtctagcacaatgagtaaatccctagttgactatggagaacaaaaatcatgtgctgtaacaacagcaaaaagactagctgaattcctcggggattcaatggtaaaagacaaagggctgcattgccaatacatagttgcccgggagccacaggtaagtactgaatagttcaacaattaacatcatgcacttacccattcctttaaattttgatagttacggtaccatatttcaattttggatagtcacggcatgttcctttcagtgggcaaatattccctttattttgttttcatggaatttgtttattctagttttcatgatttggcttgcttttttccaatattcctactgctttgttgacttgctgaaatcatgtagggcactccagtgagtgagcgtgctattccagtagctatctttgagacggatgctggtattattttaccttcaaatcatgtttttgcaagagccaaacttttcaatcacttacattctcttgctatccttgtatcttacagaaattgcaaagttttatttaagaaaatggtgtaaaatctcctctgaagcgagcatccgatctattgttgactggtcttactataagcaacgcctaagctctgctattcagaagattataacgattcctgcagcaatgcaaaaggcaatatattttttacttgttactttgattatattatatactttttacttgtcccctttgattttccatgacatttgtgaaatcatgttgctacagatttcgaatcctgttcctcgagttcttcatcctgattggttgcacaaaaaggtcagagagaaagatgatcgatttcgccagcgcaaactacgtgatatgttcaatcctttggagaaggacaggggggtgcagaatttggatgggacaggagatatggaagatttattaacgctggatggtggtatgagaaaaagtcatgtacccaatggttttggaaaagaaaataaaccaaacgacgcaccatcaacagaagctggttcaaagcatagcaagaataaacaaaaatctataactaggtcaaatgaaccccttgccgtacatattcaaaatgatgctgctgatgaacaagttgatagaagtactgattatcaaggatggcttgatgctaagaagagaaaatggaaatatgttcgtgagcaaaaaaagcgtcaaaggtatacaaatttatgttgtacacaaattccaactaatttatgcttgtaaatgatactccgttctacattttaagatgttttggtctcttcatccttgtctagattcactaacatccatgtaaatttggacacatgaacataggatctatgcatatctattcaaaacccaaaacatcttacaatgtgaaacggaggaaggacttatagattcagttcatttagcattttgttcctctcctagctctcaaacagactactagactaatcctggacttgacttcaagtttgtcatagtaatatgtagcggttttaggctgatgatagtaagcttacattttgccagcgtgaatcagccttttgagcatcgcattaccttataaatcctaagttacattgatatgatggactggtgactatttttctttgtattgtcactgttaatataatggagattacactaagtaaactaaacagctaatggagggaagtcaatgtttatgtttcctttttgcatttaccaggttgggtgctgcagtcacttctgatggtcccaccaatgatttgttttctgcaaggaatgtcggtcagttacatggcaatgctaggaaccggtctacatttttccagaaacaagaattggccctctttagatcacattggcaggcatgctacttctgctattctattatgctatgtaacatctatgttatgatattaatctttcagtaatatattcatttactttgatgcctgacaagctcatatattgcccacatcagataatacagcttgcttcgagtacattgcctggccacttttttgcatgggttgttgctgaggggatcatgttcaagattcctatcaatgtgccaagagtcttttacctaaactcgaaagctcctgtcacagaagagtttccagggaggcgtgtaaagaagattcttccacatggaaggccatgtttcaatctcattgaggtgaaaatgtgaacaatatttgcaaaataaccaggggtgcaacttgtcttgtttaagagaacatactaactgctaaaatccaggttgtaactagtgaagaacagttcagggtggagggcaaaaagcttgctgcccatcttgcagagccagatgttgaggttagtagacttgtgtatgtgagatgtaatcttgtatgtttttcttgtatctaccttataacgttggaattgcatctagggaatatacgagacgaaaattctgccagagctcaatgccattctccaaattggttgtgtgtgcaaagtggataagtctgcaaaaagacgaagtatccaagatggatgggatcttgctgaattgcaaatgaagacaactgcagagtgttcatacctggaacagaccgtttcatttttctatctataccacaggtaaccttttatgagaactttgtaaataggtaatgcagtatccagtctagcttttgcaatggattgttatttttatactctggaatactatggtactattgtccatttcttttctttattgacattctatgtactttgagttcatttattcaagcgctattattacagagtcaaatactagttcttttgtatgctctctgggtcccaagattgctcttcctagcagttatttgtgataattaatccatgtttatgctcctaaatgtatggtagaataagcataagttactcctacctgtattttactaaccaatatttgaaaccttgactgcactcatacttgatatatggttgttttgatttggaaactgatctatggattctcttatttccagcttgtcagaaggaaggggtgtatatgtcatgtacttccctacatctttcagaatacatgcagtggttgtcaatccgttccgcaataaagagctatcgccatcatttcttgaaaagcaatatcgagatgcttgtcaagctcttggctctctgcatgaaaacatcactttccttgtaagaatgaattatcgtatctgaataaaaaaaaattgcacgtgctggtttagcatgctaacttctgactatttgattccttccataggtggattaccacacatcaattgatgcaggtagcaagcatgtgcaaagaatgttacttgaatacaggtatatctctttccgaatatttcaacaattcaacttttttgttgactctcctttttctgagctatgcatactttattgaattgcctgaagtatttaccagctataagcagggttctggatcaggctctgttttttaagatagtgtttaggacatctgtccaacggacatgtctgataaactttttctaaccatgtataaaaaaaatattaaaaatataattagatgaaagtatttttcttgagaaatctaccaatgccatttcacatattaaatcttaatatttttccatttattatcgagttaatatttgaggtttgagtgcatccattgtaatcatctatttgcgagtggagggatcacttttagagaggtgaactgaaccaaggtaccaataatatggaccagactgaccagtttgtaattcaatacttttgtctggattttgagttttggtagcaaccaactgatttttgagaggtagagtacaattcttgcactactcgtatgatattaactttagtctgttgcttactgtaaactgcatcaagcagtatgaaaattcaccatgtaagtgcataatgtcatttgttttacttacaatgagctaaatgaaatatttttcagacaacaacatcctggacctgtcataggcgtcatagaatgccctaaactccaagctctaaagtcagctgtacgggcacttgatgatttcccgtgtgtaaccattccttgcaatgcacgggataacaactatcaggtacataatgggacaccatttcttacacttctactttcatttctttctacctatcttgtttttcttaatcgtattcgtccaggctcttggttggcaagcgacagctggtagaacaagcatgcaacgttgtgctgcatcaacccaatggtttaatgaaagaatttcacttgctagatatgcacatgtaagcatatagtctagtatgaattccagtaagttatttaagtacatataaaaatgagatgaccatcaatgcttatggaaacaggtcccattgggaaactttgaactggattggcttcttttcaccgctgacgtgttcttttcaagggcattgcgtgatcaacagcaggtttgtcatatatggagtcaatgcaaatttgtgtttcttttttccctttctagatgtatgtgtgcattgcccacattcatatatatgttaatgaatctagacatatatatgcgtttagattcattaacatctatgtgaatgtgggcaatgatagaaagtcttataatatgaaacggagggagtacattaatatctccttcagtgaatgccagagctcctggccaaaattttaaaacatgatgaagctgaggtgtggggaaaacaccctctctgaaaccaccaggaagggaaagaactgccattgccttttgggatccagtcttgaagaaattctaccttaggcttagtgaaatcttgatcagattgattttatgtgctaaaattcgttggcccttgctgtcccttgactcccttctcagaatcatgtgcacagaaatagaagaaatataaattatccggcagttattatggtatggatcttttctgaaatgtttaagcttcttactaactttctacttgtggtaggtactatggatatctgacgatggtattcccgatttaggaggcacatatgaaggagatacttgctttgctgatgaagtaagaagcctttatttcctaaggttgcatggtgcttatcatttactgtttctgtgctgctttactaaatatgacttaattttacaggtcatccagcctgctcttacttatcctggtgcgtatagacgagttgctgttgagcttaaggtaagccttttcaacatacaataaagtatggcatgcttattttgtatcttctggcaattgaattacatgtgcacatatttcttccccagatccatcatttggctgtcaattctctcctaaagagcagtcaagtagatgaaatggaaggagggccgatcggtagctttgcaaatgacatgcctgctggtccaaatggcactgaaactgaattcgatgatgctaccttatgtctacctgctttccaagtgctgaagcaactcattcagcgatgcatttcagatgcagtatcttctggaaatgtgtttgctgatgcaatattgcaacatctctaccgttggctttgcaggtaattatttatgtgtttgcactggaccagttattattccctctagtaaaaaatgcatgccatttgaacaaacatgcagctgtacttttgaaactttgagtatcaatatcttaaatatttaagctagaaacacgaaaaatcatatctagagattagtctctaaaaatattatgattttattgggttttatgaatgtatacaatatcaattagttatgaaagttggactttggatactgcgttgatactgaatatgaaatgtattcatgaccagagggagtgaattttttttttaactttatgtgttcttagcatgttgatgtgtgtgttttttcagcccacgatcgaaacttcatgacccagctctccatcatcttcttcataatgtaagctatgtaactaagtgcactgtcctttcttttgttgatattgcgaatcttcttgtcgttctggttacaataaatatctttttctattcataatcatcttacctttattagttttcttgtctaacttttcttatcatgtcttctcttttggattatcaaacttaatcaggtcatgaagaaggtctttgctctcatgttggcagagtttcgaaagcttggagctaatgtcatctttgcgaacttttctaagataataatagatactggaaaagttgacctgttgtcagcacgtgcatactgtgatagcttactgaaaacattgcagacaaggtactgtttgacctccccctgcaaatttgaatggggtatctcttaggtgaaactaaagttatttgttttagggatatttttgagtgggtggagctggaacctttgcattattggcactccttacttttcatggaccaggtttgttcatttcgttgctgccacaaatgaattgttttattcattttgcccttatagagtatgttttcaccttccatattttgttttggttcagtataactatggtggtattcaggctaaaatgcaaaatgcaacatctgagggcagctcagatggtgataacgatatcgacatcgtctcaagctggaacatagcagaatacctgcctaaagctacacaagtcagtttttttaagtcattctaacacttgtttgcttctgcttgctgactgcaactttggcgactatcctggaattagagtatttgctacttttctgtaacatttccttccaaaaatttcaggatcactttgtcttaattgtatcggagtttttgtatgttccatggaaatacatgaaagaacaagtagctcttcgatcaactacaagggatgagacctcatgcacaccatctataacaatcatggctgctgaaaaccttgaggttcaagtcataggatatctccgtgatcaggtgattttgtggctctatagtgcaatcttaaattggtaaccagtaaccatctcccagttaaatgaaaatgacttggtaggagctaccacattcaattctgagaggttagaaactgttatgtcaattggaaaaaaaaaggagaaaaatctagattatttgaaaattggtcagattttgacatctgatctgtttcagttgaaatatattttcaatcatagcaattagagttgtataaaaaataaaatgtaaatactgcagtatctagtgtgggtaattcagatagtttttataacaatttgttagtcaaaggttataagaaatatatatgatgggttatgatgaaactatccaaggtcaatcttaatagtctgttaaaaagttcaaatttgaaatgcatgttgctcaatgtcaaagtatatactacctccgtcctagaatataaggatttttagggttggacatggttttttttagaacatgcaggagatctgcgtatcacttcattaagatagagaagaaaaggtgtacggtgttagagaaaaactctgacacccacccatcaaggatacaacagaataccatacacccaaaggaaaaaaaaacacaaactagtgcaatagcagccaagtcctagtaaagagatcacgaagcctagcagctcctgctaggcaccaaagagcgccctcattagcgatgtctcggaggacatcggccaagcatggggaagcgccattaaacacacaatgtgattggatgagaagtggaggtaggtggcaaaattgaatggtggagggttgtgattggttgcggagagaatgttggtgaagaagttatattttgggacaagtcctgaaggctaaaagttgttatgttttgggacggagggagtatatattaacattgggactgggattatcatctagtgcgactaacatacacaactttaatctgaattccatatctgatattgcagataagtaattactttgcagacaagcttctcaggattgtaagtgatatacttcatcatttcaaaggaaaaggcaagtccgaatcagttgaacttacaaacagagaacctgatcctcacacacataagggagatgctgcattagagttcattaagcatatatgtgctgttcttgctcttgatcagaatgttcagcatgatattctggtaattcgcctcttaatccattgtgaactgatggtaactgcttttactgtagaacttgtatccaaaaatataatattttctttcactgatgtgctaaatgaggatccactgttcaaaatatatgttgtggttttgtggaactgcatgtatatcttttcacacccatatttctatctcttcaaaacataggagtttcctgccttgatttttgacagtttttattacaaaattgaagtatctaaattctaagaaaactgtgccacgacctgacttgaaaaatatctgacagagaatgaggaagaacttgttaaagttagttcgtgtaaaggagtttgctccagaagcacagttccaagatccatgtgcctcattcactctccccaatgtgatttgcaggtattacctctaagataaattgtagaaactgtttatttgatttccatataatcaacattttaagatgtaaacatacgtctatggatacaactgtgaccgattcacttaggtcaggtgtaggtgatgccatttgctgtaaaagcattattgattgccatttttttaagagtcaaagaaagttatggataacaatattattgaaaacatggtaatgttttggaagaaggaaaataaactaggtcaaaattattttttccaaaatatggcatgcttttgactatatgtaatcatgtactagctactattttgtactacctgcctaccatggcttattccaattcgtaaaattcacaagtttgtaagtattgggctggtgaataagcactagttttcatcaacccttgatgttactaattcttacgtaacaacatcgtgtttgcagctattgcaatgattgtcgggatcttgatctctgccgtgattcaacactccaaggtcaggagtggaggtgtgctgtgccgcagtgcgggcagccataccatcgtgaacagatggaaaatgcacttctacaggtagtccgtcagcgagagaggctctatcacttgcaggatttggtctgcctccgctgcaggcaagtgaaagcggcacacttatctgagcagtgctcctgtggaggtgcattccggtgcaaggaagaatcatcgcaattcctcagcaagatgcgggttttcctaaatgttgcggtcagtcaaaagttcgagctgcttcaggatgttgtccaatggattctagaggtcagatgatgtttatcactacattagttaacttgacataatatagttgatctctgattttgaccagcttacatagaccagtgcagcaaacattgtacagaaatgggtgtatagcagtacacttgcagttttccatattgtactgtattttttattttggctctttcatgctgttcagtagaactagattgtcccatcctgtttggatggggcttgacctgccagaagtggtatcgagggttactcaaggtgtatgtagctgtaacgttagtgccagccttcaaccctgattgtatatcgagaatttgtctgtttcacatatttaaatgtgagctgattcatctttatgttggatttgtgttcctttttttaattgtttgattgatgcagatatattgccatcaaaaaaagttgatgccgatataattgtgtagccatcttatatgcctctgaagttaacacctgtcgagttgtggcgtccagacgtcatggttgtttggttgggtgggctatcattactgtacacagggaaatgtaatcccggcaggctaggcctggattttcttcaggtcggcatgcaatctgacctcagccgcaacttgccccaagccatattgtaattccttgtcttatttcccgaatccatttatactagatccctgctagaagtatttctgtgagcattgtcaaacttgtcctcttgtttgcgatgacgatttgttgatgtctctgacatttctgtagaggacagagaacgctgaggtcatttttattgtatcataatggcaatgattgtgtcctgctaccgttttagaaatccagagcatctccaagggcagcaagtggcaggtcagaataacctgtgcctcatgcacgaggcccaactcaaccgcagaagatgatcaactggtcttcagattttatacggatcaagttgtctttagattagactttcgtgtgatattgacttgttcatattggtagtattattttttttgctattggctctcgaagcagagtaggagacggctagctcaagaaaagcctttcattttgcgtagtctctcctggtcgaggctgagttgtcgagttcagactccggggaggctcaccaaacggttgaccttgagatccaagaagaaaaaaccgatgcacgcattcatcaaatgaagagctagcttctaaatagttttttttttggcagcttgcttgaaatcagatgcaaaagggcgcacatcaccacaaaagatagagtaaaactagttgaaattcagaactgagattcactatagtctttttattcatagtgattcacagttaacactgaacaaaacaccatgcatgtacatgcatcgatcttttatcgacttaggggttggttgaacacgcatgagatcactcacacatacaaaactacgattacagagatacatcgaacgcgacatggaaacaaacgttgacatgaacagttgaacttgaacacccctaccctatcacagtcatagcatagcaaagcaagcaagcaggtgaacaaacctctctctgcatgcgcccaacacgtgcctactatagtacttacaagcagacagcaaattgattaactaaggacgggcacgacgagatcgccggcgatggccggcgtcgcgagagatgccgagacatcgatcacgagcggccggcgacgaggagcctcgccggggtgctcatcatctggtacccctggtgttggtggtggtggccgtggcccccgtagcccctgccgctgccggcggcggcgggaccgccgaagcgcgcgccgcagcgcggggacgcggcggggtcggcctgctccatctcccacatgacgtccatgaaggcgtcgacgtcgcaggggagctcgagggggccctcgcacccggcgaacccgtactccgtctccgcctggtccagcagagcccggaacagcgggtggttggcgcaccgcgcccgcaccgcgaaccgctccttctccggccccaccagcaccgcgaagaaccccgccggcacggccgcgccgccgtagccgccgccgccggcggcggaggcggggcgcctcgttgtccggtgccccagcgacgaccggcacctgtcgatcgtcttggccaggatgttcctcctctcccctcctcctcctcctccttccttcatcgtcgtcgtcgccgcgcgcagcgaactatgcacaaattaaactaacagctgacacaaactactaagctcctcttcgtgttcaagaactcgagcgatggaacacagaatgattatgaacgctagtagcagctactcgctaagctagccgcggtcgtaggcctggtggaggcgggacatgtcctcggtgggcttgggcgcgaggaggcgcagcgcgttcctgatctcgacgtcggtgcagcggttcatggctccttgcgacgaggcgtcgtcggcatcggcgacggaaattaactaactagcaaacaacgatcaggctggttgccgctgatcgattcaaggagatcgaggaggcaacgagagagagagagctagcgatcgaggaggagttaattgaaggggttgttcaaatggagggcgaggagaaggcgagcgcgcgagcgcctccgctggtttgtcgtgcggcgtcgagtcgtggagagaggaaattaacggttgagagcaaggttggctcgtgcgtctctggatcgagggtggggggtggcaaaggtgcgagcgagctcgagcgaggggtggggcgaataaatagagggaggagggcgacgactttgagctaagcggcaaggacgtatacgctagtactagctacgtactcctatataatatggccggatctaggttcagatccatcttttctagagccgtggcataaccaaacaattttaaatccatataaaggagagaagtggagcaggctttactgatctcagtaaaataaactagagagctaggtgaagcaagggtttggcgcgcttcacaaattctactctaagtatgctcttgaagttatttttaagagctgtagctctgctaaatggatccatgtatatactcgtgagcatacaacagctaggtagttagacactgtatttttattttttaaaattaaacttctttaagatataataagtactctacttgtattactatatattataccagtattatggtcttagaaatagttttggtagttattttctaagttgtagtaccaatgaaagaaaatattctactacgtttatatcagtagttgatatgatagtataaatatatggggacatatccggtgaaaaccatcaaataagtgaaagcccgtgaaaccatatctaaaagtttttaaattcatgaaaaaattataagagataggtatacacataaagtacattcataccaaatctcaagtccaaactcaacttcatttgggaaaaacaaaaaaacaaatttgaggtgaataataacataacactattcatacgaaatttgtctttttttttctctcaaatgaagttaagtttggacttgagatctggtatgaatgtatttcatgcctatacctacctctagtaatttttttatgaatttacaaaacttttagatatggttttcacgggttttacttatttgatggttttcattggatattcccccgtaaatatacatgacatctatattaagaagaaataaacagtacacttctaccagagaatatcatagaacacctcttataaaaaaacatgacaacatctacaaacatagatttaatccactaaatccataactaaatatgttttatagtgaatttatttttattagaagttatgttatattttctacaaacttaattaaattctatttgataaacctaaagtaccatataaattagtaactaatacggatggagcagagggagtagcttagctacaggctctagcttgccgacgtatatgtgtttgcatggcggattgccatatactatattgtactactagctagctagcataaggccgggggcgtgcgtcagcggggcggggcggcgtgtcgtggatacggagagccggagaggagaggacggtgtatgcggccggggatgaccgggggcgtcgccaacccggtcgacgggtccaaacgctacacaacgatcgacgttgccatcgatcatccatatgcgtgatgcatgcaggaggagggatatcgaatagttaagtaccatctgttaactgggagttgattggacttgaaagaaatcaggtcaatcttatctagaaattaatcggtttcaattttgttgtatttatggctccgcgggttagtctctgctgataaggatatggtgatcaagccttttggataggttcatataggagtaaagtatgcgtgtgtacgtttacaggaatgagtatgcacacatgtgtgcatttatatggataagttataaatgcacatatgtatatatgtgtctatgtttgtattgtgttaaatatgtatgatgatgaggctctttcattatttcattacataagagtgtatgcaagaggggaaagatgatgttgttttattggattattataataagggtatataatagtgaagactgtcgtgttattatatggtttagaataagtggtataattaatatagtaaaaatattttgttttaaaaaacatgaaataaataatccacagtaataatagaacgaataagcagaaaggaatatgatctaaggaatatgatctatgttgcaataactatgtcactcttccttagaaaaaaacagacaatgcaagtacactctcatatcctagctggcaataattgtgaacagacatctccagtaaatggataagcacaaattgtgtaaaagaatggagtgacaaagtagtcaactgtttgttgcaagtaaacggggcattatttaaacaatcattcatcgtgtaggggttagtcaactatgattctatcttatcattggagtgcgttttgggatactatatatgtgatgcacgactgattagttatacatgccagtcttctatttgataatatggaaatatttgaatataatggttttttcattgcaaatctgcaatacgtttgtcccctagctagctagctcgatatcataaccaccaccttccttttgtttttattttaattttgagaaataaactttggtcattaaattttcatagaatattttaatattaatcgtatatatactaccaacattttatgaaagcactttaatttaaaatctgaattttttttttggcataatgtatctattcaaaacaaaattgtagtgtttgacacaatatttgatcaaagtctacagtatgagggtagaaaactcacatgaaaataaaaataggttattgccatgaattattttcaattcatgtggcatattttattttttcagttctaccgggttaatatatccggtgcggtaattaaaccaggtattttgccgtacactagtaagaacataaagagaatattgaaatgtttaatatattgtacagttcagctatttaaggcctattacttgtttagtttaattaatgatttaatccactatatgccatcgataaagtatgaattataggatgtgccattgatgaagcagaattctatgatatactatcaagcaattcgttttctttcatatatgccaccactgttagttattaactgctagtcaactctgttaaggtagaaaattatcatttctcttagagtaccatgtttacgtatggatttcatttattgggatatttttttctcattcgcgaaaaatagaattgcttgtttattttatcatccaaaattatttcacaagtcacggcgttgtgcagaatctcatttttacccttcgtaaaattgtcattttctctttaaacggagtttgattaatgattgactaaccacacaatgacaaaatagtatattatagaattgagctttatcagtgatatatcgtaggacatgtgctttgcaatgacaaacgtagaatggattaaactcttaattataactttataagcgacggcccaaaggtgcagggtgcaaatgaaacacatcataagttaaacaagatatttaatcgaggtagtattattcatttgcccccaacggagattatttcatattcgttagttccagctcgaactacttcaaaaaaaatccatgggatgcacgcattattgtccctagaatatatcaaaataaaatgcacaacggctactcatcatcatctagtgcacggttttgacgtgtaattaacatgccaagttgctccataaatctactatagtttgacgtgattgtgaaggatccaagaaaaaatagtaaggaatctttaaaaaataactagataaaactatatatagccctccctttatatgtatcatatatgtatgacaaaagaaaattagtgcaaacttcattaattagggctcccgtgatccaattgccagtagtgaaagctcgagcctccgctgccttcacgctagatccacccctgctgcttgaagggaatccggtagattcattcaccaaccactgtttaaacggcaagtaagtaatttagtatatgtaattcctccaccagcatgagtagtattgggaggcaaatccggtggcgcagttcaaaaaaccagctgtgttgtatttgaatacttctatgcgtacataccatcttacaattgtttcatactgctatatgcatttttcaacatgttacatcacatcgatggatctagaaatatagaatatagaattagagatgggtaaggcaaaaagactttaggcctgtttagttcagaaactttttttcccaaaagcataacatcgaatctttggacgcatgtatagagtattaaatatagataaattaaaaaaactaattacacagttaggggggaaattgcgagacgaatcttttgagcctaattagcccatgattagccataagtgctacagtaacctacatatgctaatgactgcttaattaggctcaaaagattcgtctcgcggattccaggcgagttatgaaattacttttttcattcgtgtccaaaaaccccttccgacatccggtcaaacatccgacgtgacacccaaaaatttccttttcgcgaagtaaacaggccgtaaattccatgatgtttgactcagaagccaagtaggagtagctcgaataactggagaaggaaacgcgattatttatatttggaaaaagtacgaaatctatcgcggtcgaccgaattaccccctgaaccacaaaaccggacattcttcacccccaactttgcaaaccagacaaataacccccctggctcaatccgcggtggttttaatcctatatggcagtccagtcaacaattcatttataaaaaaataggtggcccccacctgtcagtttctctctcttctatctctttcccaatatctcactctctctctctctctctcttcatcagtgttccatgagaggccgcacctgttagggccgtcgccgccgccgacgtccagaccggccgccgcgccatgctcaacctcatcgccaccgggatcaccggcggcgccctcgcataggcggcgctcgccaaggccgccaagcccatcaagctcggccccccaccaccgccctccggtgaaggagaggttctacatgcagccactgccaccagcggaggcggcggcgagggtgaaggaggcgaggcggcagcgggcgcgggctattggcggggcgtgatgagctaaggtcggcgctgggggtgggtgcggaggcgggcgcgggcggcgggcgggcgcggaggcagctgcaggtggcggggcggaggtgggtgaggaaccgatgacgacaactgggcggggcagaggcgggtgcgggcggcgggcgaggagctgaggacggcagcggggatggttgcgagcggcgggcgggcgacgaggcatcttctggcggcgggcgggcgaggagcggacgccgatgggtggccggcggcgggtgatgcaagcggctcttccgcaatcgcgcctccgtgaggcgcctgccgatcccgggcgccgatgacgagcacgtcggactccatcgacgacgacgacgagaagctctgcccgcggttgtacctcttcttgacactggcggcggtgcccacggcgagcgtgggctctagctccgccgcctcctcctcgtcgtcgtcggtctcctccacgtcctcctcctcggggctctgcgtgtactcgaccgccgacacgagccacgggccacgggcagaccgcgagccacgggccgccgtctcgggcgacgccgcctcacctcgcgcttccgccccgtccgcccccgtgcaccaccgcccaccgccccggggcgctgtcgccctccgccgctcgccaccagccgcgtccgccgctgccacttgcgtcgccgcccacatcctcccctgcaccaccccacgaccgtgagagagagagattgaagagagaggaagaggggaagggcatgtgggtctcacatttttaaaaatagaaaatgctgactaggttgccacgcgtacgtcacgtaggacaaaacctcgaggggggtaattcgtctggtattgaaagttccgggtgaacaatatatgatttttgggttcagggatgtaattcggtcgaccgcggtagttcagaggataattcgtactttttcctttatattactggtagcaacgcatagaaattttagctggtctggctgaccggccggccgagagctgcagagaaatttcttccattctgaaataatagatgtttaaaaccatgctcaatcacacacacacacgcgtgtaatattaagatttaacatgtgaaaatggcaccaattatatatttctgttgtagtgattttagcttgtcatttacatcatagtctaataataggaacatgtttctcatttctttaatcatatatacgtaaaatcatttaaaaatatacaacagtgtgaaaatatttttaaatgattttatgtgtaaaatattttcaccgtgttatatatgttcaaatgattttatgtatatatgattaaagaaatgagaaacatgttcctattagactatgatgtaaatgacaagctaaaagcactgcaacagaaatgatttttgtaaacagctaaaatccatttccgcaaacggctaggtgactatagggatggacataaagctcgtggctcgttagctcgctcggctcgtaacaagctcggttcggctcggctcgtttgattttcctaacgagccgagctgtcatttcagcttgttagagataacaagccagctcgagctggctcgcgaactgctcgtgagcttaacgagctagagcaagtttgcagacatatttcctcacatgtatccccctcagcccatggccgaaatacagcccacttaggcggcccaattaaccgttcatatataagaagagaagaaaacctagctcagtctttcactctcctgatcccctttctcatcctagatccaatcggccagggggcggcgacggcgaggcagccagccgccggctgcgccttccacggtcctccgcgcgacatccacgagcctccaagctgcgccgccacatgcatgccgagcttccgcgagacctcgacacgccgctgttgttgtctccaagcagatcttgcgctcccatcctcttctggtcgactactccacgcggcggcccgctgctacagctattgcacgttgtgccatggctgattagttgccactaatctttctggtttttcatgcttgattgcttcttgttggactattttgtgcttgattgcttttgcatgtgtaagtgtgagacagatcttttgttttcagccatcaaacttgttaatttttgttgtttcctgattaattacttaagaatggcgtgtgtttttgcacttggcaagtgtttagctaagcattgcccctgctgatgtgtatttttgatgatttactgatggtatgtccatcgtttgtactgcatatttctgaacttctgaactaaccaaaggttggagcacttgtgcttgtggaagtggtactgatttgtgctgaaacttgaagtaatgtatgaatggatggaacttggcagttgtttcttgttgattgactgtcttatactcgtattatactcttattgattcactaatttgcatgtatatatgttttttagtcacaagctcacgaggtaaacgagcgagctcgagctaatcaacgagccgagccaagctgggtttttacctcgttaagatagcgagtcgagccgagcagctcgttatcctaacgagctaccctgagccgagctagctcgatatccaaccttaggtgactcgtttcccatagtgtagtaaaaatgagtatgcatttttctaatcgggcagcacacttgcttagttgcttatgaaaatgagtatgctcgaaaattgattttcacaagtgatcagttaaaccaactgtctgcgaaaaaattcaaaaaaaacccccaaaattaaaaccctagctagctctgatcaaccgccactgccatcatcctcgtcactgcagtccgtcattgccactgtcgtagtccgctgccattgtcattggtgctgaggccccacagctcccaaggtcgtcgttcgcaaatctacccctatcgagaccggcgccgtcggatctgttgtcgccgagctcggatccaccatcgtcatcgctgtcgctaaggccctccagctttggaggctggtggcagatttgcttctcccgaggccagcgttgttggatcagccaccgctgagctcccgagtgtcggatttgtcatcttcgatctcctgagcggctgcacccgccgttgccgagctctcaatgttgtacccgccaccacagagctcccaatgttgcacccgtcatcaccaagtttcctagcgacggatcctccatcgtggagctccttgaagccagatccgccacttcaatatgtggacactaccattaattgattctgctattaccatcgcctgaagccgtagggggcctccgtctccaccacccgaagcagtcgtcggtagaagctcgccgttgtcgcctccaccaccgcctcttgtccatgccgctcgaaggagagtagtggagatgagggagaagagagagagtgagagtagaaaggacttagagagaagtgagaagacgcagagaggtaggagagtaattgagaaacgtccagcgatcttccgggtagctccacaaggttagagagatgatgtgtgactggtcggtgctatatttttgcatatagattttttaagagatatgtctgtaaaaataaccctattttcgtaggtagaccacttaatacgcccgcatataaaaatcaaattttgtagacgggtctttattagacacctaaaatcattttgcatataaatattattttagccggtctgtagaaattaaaagggtatctctaaaaatcatttttatagtgaagaaagtactatatatcaaaagaaataaaagaactacaaatattaaatgggacgtactatacgtcttggccaacgtgttagggctgtcgatccgcgacaccacaacaatagaaccgaagcatatgaaatagtaccaagtactcccaccgtcctaaaagaagtgtagttttacgctgtttatgtgtaacatttgaccatccgtcttatttaaaaaaaaatatgattagtatttttttgttgttattagatgataaaacataaatagtattttatgtgtgactaatttttataatttttcaaataaaacggacggtcaaacattggatatggatattcacgagtgcgcttattttagaacagaggtagtacaacgtagctgctacaaactaggccccctttagttcctaaaattttttccccaaaaacatcacatcgaatatttggacacatgcataaaacattaaatgtagattaaaagaaaaaattaattgcacagttagggaagaaatcacgagacgaatcttttgagcctaattagtctatgattagccataagtgctacagtaacctacatgtgctaatgacggattaattagtctcaaaagattcatttcgtggttttcaagcgagttatgaaattagttttttcattcgtgtccaaaaaccccttccgacatccgatcaaacgtttgatgtgacacctaaaaattatcatttcgtgaactaaacaaacaggccctagacacagagctatccagattccagggccctagctagaacaaactagaactactaggtcgaccatgcatctcatcaatcgattcttcgcaccgggattcggtcctctaccaggggccggggctcttgtgggtggcaacaagaggcgtcgtcggtcgatcgtatcagcacggcgagagagcccaaagaggcgtggatcgatgctagctaattatgcaggcgaggagagcccgcctatttaggcaggtctgggcctctgcggtgtacacgggccttgcttagcggccacaattgaaggaaaggcttgacaagcgatttaggctacgagatgtagggcctgtttagtcatgtagactaaccctcactccctagcacgtaaaacgaagcagggtttagcacataattaagtaagtattaataaaaataaatttaaaaaatagattaatatgattgtttaaagtatcttccatgtagaaaattttaaaacacacctcatttagcagtttaaaaagcgtatgcgcagaaaaagaaggaggtgagttagaaaaatagggataagaacttagccatagcagttagtatgtttcctaaattgcttcttaaaaattaaataaacatatttttttatattataataattaatgcttaattaatcatatacacacacactaatgacttgtcttgtttacctgccacaaggttgccacctccaaacatccaaacgaactcagccttagttaagcttggataatgcagaatgttgtttggtggcctgatataaacatctgtacagatgggattttgtttgtttgatcgtttttcaatggcgaggcttgcatttatatctcatatatagaaatactgtgtagtttcaaaatattctattataataaaacttatgtactaattggaactaacctttagctctaatatatcactttataaaatcattttgttgcatctgacctagtaacaaaaaaacaaaaaaaaaatcgaagtgagcgcaactagccgctaggttctttgtggtagaatttgcccacccaagctaagtcatagacttggcatgtatgctagtatttacggctaattattacagtatttcagtggtagacaacatacatgtgtggatagtatggcgctcgtagtgacttcattaattttaagatatgtcggtctggtcttttgaaggtgctcatagatgtagggtatatgtgtgtgtttataagggcaagtgtgcatgttgcaagcattacacttgtagggtgtttctaaaagacaagaaagaaaaagagaatagtggtagcctcatcaccacattgagtagtttgggggacctccgtagtagtgcacatgcaatactacagaggatcttgacgtgtttaggctggctggccactcgccgccgttcgagcaagagggagggggattggaattcagaagcaaggcgtcatcgagcattcctcgagttactggatctggcgtcctctatggagttcattttaaataatgtcatattattaaactaggtgattccctgcactaaccaattctcaatatatatttttttacaatcaagctaggagtaaaaagaaaaaaaataatgaacatcagggtttatcactatttatcatgaaccaatcaaatgatacccgcgctttaatgtgaaacatattgataagtatatgttaaatattataagaataatagatagagttgttaaaatattgtgcaaatgatgcgaggggtgatgattggacatgcttgcatgttgatttgtacattaaataaattgtagatgatgttttatgcttgcatgagattaaatatgtaattattgctagcgggtgatgatgtggcatggttgcatgctgagctttagacttagtggactataactttataaaaagtatagatgtattgaatcataaagatgatactatgtttgttttttaagggctaaaaattattacattactaaaaaaaatataagccattagattgttatggaactaaattatagtgtagattgatatcaaaatttatatacgaaatacaactgtacataagaggaagaagaaaagagttagagttgtatattaaattcaaccctacttttagtatctattatacatacaatataattacatatattgaaatataaactaggagttgtataacaaatccaattcaattagctggtataaaattacatagcgaaattgtacaatctaatatagctaactaaatagacaacctaatttaaagttgtctatgtgccgtctacacatctctactatttaaaaaggagagttgtccatccgttctctctcccttgagtgtagcacgctcttctttgggaaaaacagtaaaagcttcgaagataggtacaagtccgttgtaatatacggacatattgccaggaaaatgataagattatatagatgggtaccgtctaaatcactatgcatgctcttacagtgaacttaaattctttaaatacttcaagggccacttatgcttatacttataaagctaaaatttaaattttagaatttaattttaaatttatttttcatcatagtttattttacattatttacactcacaaatgatttactatttaccaatataagtgatacggataagcaggtgagtaacgctgcaaatgggccgaaacgattcgagcacgacaatgccaggagcccacgaacgttagatgtggatcctacggtcatacgccctcggaagcacaccctcactaaaatcctccactgccgagccagtcgcgccgccgaaccactccgtcctctcctcgcccaccgccgccgccgccgccgcccatcctccttcctctcctcgggcgctgaaccgccgagctgagcagccgccccgccgccccctcctccgccgccacaagcccgatcgaggggtgtctcgcccgggatatatatatatggcggcggggccggcggggatcgtgtggcagacgccggcgaacccgccggagcggcaggactacatcttccgcgacggtagtagcaacccgcagcccggcctccgtctcgtccccaacgcgcgcatctttctttctgcccgccaaaccccctccccggaggccccggactgacgcggttggttattccccccccattttgcttcgcagggcggcgctacgtgaggccctactacttcgagttcatctcccatgtaaccaacctcctcggttttgcctgcattttattacatatttatgttgggaacataggtttttttagttgcttggatcaggtgattcctgcttgttattagttataatgtctactgaaaattgttgtttcgagaataaatatattgtgcactgaaaatctatagaatcagatgttactgggttttggcctaacattttttcttaatcttttatctgctccatcaaatatattactacttaattgcaagctgtaacttattggcacctccaagttctccctttcctctacaccactgcgcaatatacaaaagctgtcactctgcattatggggcaatttgggttatgtttctattatctccaagcgatcctgtcgagttttacttcaaccaaatccataccctctagtcttggaaacatgtcattttggacatggagatggtctttaaaatacacctttgaccattggtttatgtagcctgaagatattttaattttatgaaagtagttttttgaaacaattctatagatatgcttctcatgcatccaacctaaatatgcaaaaagatattaatgttccaagacgacatgttttcaagatcggagggagtagtttattttttcatttggtttgcaggtgaaaaacagatgggctgggaagaccattgttgacctcttcaccgatgagttcaagggccggcctcgtgaatattatgtatgccaccagtatctcttttgaatattaccatgtgtcctataagttcctttttctttattatgatttacctttgcatatggagtcatcgggtcctaactgtagaaatacacacacaaaacttgggttctgaatgtggttcgtcctgttttatgtattccgccatttagaattgcaaattaatcttatgattcaacccttgcacgtttggaactagataagctctcttggttctttggcattatctacaatgatgtatctagaattgatttaaaaaaaacaaaattctgatgtatctagaattgatttaaaaaaaaaacaaaattctaggttcatgcagtgaagtgtgggaggcttcaggtggatgaccaaatggttcacgcagactatgttgtgcaatcatcacaaaagataagccatttcttgcacaggtgagtcaacttcatcagtttcaaaggtacattgagatggtcatttgacaaaaatattactcccttcatcccaaaatatggctacctttccacctactccctcatctcaaccaattacaaccatctcttatataatttctccacttacttcatcagtttttgcagttattactgatactttggcttctaagttaatagtaatagatcgggttttaatttaatggtgatgggaactgtaaaatgcacagaaacaatagcttgattggttcctgagtcagctctaatgttgtctatagtttttattttcccatgctaggtgtagacgttctgcttgcatggtttcgttagctctctaactactgaagctctttattctttgtaaaaaaagaaagaaacatactttcaattacaattaattgtcaaattcttcatggttgtcactctgacaggcatgaacctccagttttgggtggtgatattacaatccttcaaaatgaagctgatgttgttacagtttgcaaacctgcatctgttccagtgagttcatatcattttgttcagaaaccttcaaatactatgtgatgtataaaaaagatatacatgcatgggccatcctttttataatataactgttttcactttaatttatccttaatattaagtcttccggaatttttttggtcacttagatccattagtcaaaatatgttacctgaactttgtaagtgtaaggttgtatcgactattcaactatcaagtctaaagttataggttcatagccaacatgtgccctgaaagttatatgttaatatgtgatacggattgtttgagctgtgcgaaacatctgtagaatggaaactgtcaaggtacacgcatagctactataggattatgtgattttgaagttattaaaacattctctaccagatgaaattagtacctaaggttttccttcttgaattcataaatttgttgttaagtgtgagatcttattctggtagcagttaatctgaacagtttggttgaatgatgtttctggcctattaagatcaacaacacctttgagatttcagtagctttggaaatgcaagtgttaattccattgtttgtaaggtttagttataacttgatctggttcagctatatttgactgtagtcgtttattgttaactacaaaaaatggaggtgttttctttctgtaggttcatccgtgtggtcaataccgcaagaatactgttgtcggtattctgcaagctgaacatggattggtgcccctatttcgtatcctttgcctcaattgtgccattattgctagtgcctttcactatcctgtttattctcttccctgtatgattgaactttgacctttatttatatttgtactcaaattccttaaccaccattattattttgacagccgtgcatcggctagatcggttagtttcaggtctccttatatttgctaaaaatgctgacaaagctgaaagtttcaggcaacaggtgacattgtcaatttgaattcacctttctattgtcctgtttattccttgtgtctgctgtctgcactcaacttatgtatgttactttaacacttttatcttttcacacttatttcttaattgaatactataactgcagatcgaagctagtttgctgcagaaagaatatgtggccaaggttgttggggtgtttcctgatggtgaggtacgtcacttatttggtgtcaacagctcaacatgtcaataaatttgctggatccaagagcggaagattttgccaatgtaaaataacttgaatatactctgcgaaggcttgtagaccatttcttatactgaagtcacccgtagggttttgttatttttcccatgttgtgagaatgaaggcttggatctaccacctaggaaacgactccgtggaattttcttgtgaactaaaagcatttcatttagtatttgatttcataatttcatacataactgctgatttcccacaaatatctgtctgaaataattctttttcagcaaactgttaatgcaaatgtgcacttcaacgcacgggaaggaaggagcactgcagaggtatgtaattagtaatcctgcttgtggttggtatgttttgttgtgtgtgaaactgcatatactgaagatattgccatctctttcggcaattattgactgcctcgcacctctcttctcatgcaatgtatttgcctgagcaattataggtttatcccgcatgtgatatactggtgctgagcaattgtaggattgtacagtgtaatgtggtgtgtgctctttaatggtaacagtgcatatggctatctgtaccaaagaaataagagataattgattataataagcaaaagaaatagttgatatgggtcctatagagttcttcttgtacaagtagattgaacaatgcattcatttatgcatgaactattttcagaaattcggtagagcaagtgtactcagtaggatataattctggtttgaagaacatatctgagttcaattactgaaatgaaatgcaggtttgtgatggtgatggtaaagctccaattggaaaacaagcctgcaccaagtttcagaggatctgtactgatggaatccacagcattgtcctgtgcaaacctgtgactggccggactcatcaggtcacactaccttatacacatcaacattgatttgctcgttcaaacttcaaacaatcgaaacgacctggaaatttcccaaaaaaaaatgaatctaaaagcctactacatagaaaaagttcaagtggcctttaaacttactgcactatctgaatcataatggaaatcttaatcctgctagagcttggcaaaatgcattttaggtgcacacaggtgacacgcaaactgttgagtgcctctttatttagtcatagctcccttgtccctgttttgataacatgcttcatgcccaatccgttacttccaaaataatcaaattatcagacatctgttcaccatagcatgtctctgatgcaagatgagatagatgtggtcataatttttctgctgattctttgtgccaatagtatgccctcttgtcctatggttttgttttttcagttacttatctatatttctgatacagctttttgtttgacaaatgtagataagggtacatctaaaacacattggttacccaatagccaatgacgaggtgtacctttccgagaatttttctccacgttcgtcaaagggaacaagaatcaacagagcaaccacgctagcttgttcattgccatcttcagatcctgacagttgtgctgaccttgggaacaatgatacaaacgaagatacagaagccgatgaggagttcagcatcgatccgatgtgtacgaattgcccaaatcttgctccagtagggtgagtgcttacagttatcaagtttgtagttaggaattcttcaggccttcgtaatattttgttctttgggcagttatgatgcagatgaggaggcattgtggctgcactgtgtgcgatatactggtcctgattggagctacgaatgcccatatcctgattgggccttccttgataatgtgtcgaggaagaagttgaaatcatgattatctttcatggatactagtacggtcagcccacctgcccgaaggctcaaattttgctaagtttatgatttgtttgatatgcacataaacagtgtatgcgcccatactgcattttctagcaagaagcgctagaatctagatagtgttgtagctgtatttttatcgtacctctttttctccaaagcttgcatgctttaatatactgtcattttggatgttaaatagcttatcttagaaatctaaagattactcgaagtcatgtgcaatgatcagttgtaggggttaactttgcttgcttcacagcatgctccatctttagatctcatgcgttcgtatgttcgcagttggcagcacaaacatgtaaggcaagaaatccatgcggaaaaaggtaagcatattttgatctcaccagttacaacttacaagcaggccacgtccttgtccacggtagcttatctttaagagtcatctgccaatctgccatgtatggtccaaagtccagaaatgaccttgaattataccagtttttttcggtttccattctcttccagaagtccacttccagtgcaactgtctgccggagctagataaaagcccatgtaaataattgaaccgctaaactgcaagctgctacttggttccctccctcccgtaagaaatatagcttgaggctatgattagcatcttgacagaattgcatccaaaatctattcccttctaccataaatattttatagttaggataagattcttttaaaaccttagccattaaccctaaaccttaaccattatccaatttggggataatattttgagagtacaaactaataaattaactattacaaattaaaaggatattttaagatactgttttaagaaatttatactgttttatgatactaggttaccatttggcaacgtcaatagtcatatagttttgccctacttctgtactagaaaggactgtagtttgtaccgtttatacttaacgtttggtatttcgtcttatttgaaaaaaatatgattagtattttattattagatgataaaacatgaataatactttgtatgattattttatttatttttttcataaaatttcctaataagatggacggtcaaccattggatacgtaaactcacaactatacttaaaatagaacggatgcaatagttagcagaattctttagttagcaacaatgctgcaccacactactgaccatggtgtacgggtgtgtaggcgtgagtgtggttttcgcgtgtgcactcacacgtaataaaaaaaaactactattaataacttatatgtaggttaaagcaaaatctgtcatgtttttgttttccaaaacacatcacaaacgcaaatacatgtgcacataagtagactcatctatatgaacacagatacatcatatcttataaatatttttaggagactaaatccatatgtttaaaaattaaaaataacaaaatcgtgatagacgtctcattgtggatagttatattatctataactaaaacttattagccatgagtgtgattatctacattgattcttttctttttgagaactatctatattgagtcaaagacccgaattcagataggtatcacaagaagcatgaccaactatctatattggtctttgtttgcatgtccagcggagtttgcatggcctttgctttcttatcctgcacctttagatggtgtcgatggactttttattcagcaagcagtctctcggctctcgctcatctcaatcgccggtgtggaggtcgaagggagagggtggtgggccccagtccaaagcgctcatgcatgatgtcatggacagggaaaggacatgcgggcccccacactgtcgttgtcatttcgatcggagccgtttcgatgcggttttggtctcctcctgaattcccagacgctgttgccccataatgctcccatgatcgttgatcaggtagatcgatcgagagattgcagggcacagcccttgggcactgcaccttctgttccacagcgcaactaattacgtactcctactgctttctctgtttcaaaatcctacttccgttttaaaaaagatctagagctgtatgctagatagtactccctccgtttcacgatgtaagtcattctaacatttcccacattcatattgatgttaatgaatctaaataaatatatatgtctagattcattaacattaatatgaatgtgggaaatgttagaataacttacattgtgaaacggaggaagtatatcagatttgttataataagatatatcactttccatactgggttggttttgatgagacagtgagtgaattacacagctatatttattttaggattgagagaatactcaacacgctcatccccagctctagaaaatattactcctagctaagtcacttctcactcgcgggtaagtatatatattatatatattcattagaacagatggatcagtttaagattgttcccaaagtatgttacacatgctgttagcaatgaggttctatgttataaacacactatattagtactagaataataaaagtcagaaatagtaatatgatatttatttttggaaaaatttaatttaattaagatggtacaagttattaagtcatctaaatgattttaaatattttactccctccaaaaaaagcaattgtggaatttaattgataaattattagggattcatcggcggtctgggataagatgaaagaaaaattggttgagtgtggttggagggggaaaaagtactctagagtataatttccttttgcaaaattttaatgcaagaattggcaaaaaaaaaaaggtgagtacgtaggtacgtgtctattactccctccgtcttaaaatataagagattttagacgaatgagacacttacttatccagattcatagtactcattctagaaagtgtctcatctgtccaaaatcttttatattttaggatggaggaaatagtatgtaggaatcagaactaaagaaatgatacacgtaatcaacacagtaaaccgaccaagatttatattttgggatggaggaaatagtatgtaggaatcagaactgaagaaatggtacacgtaatcaacacagtaaaccgaccaagataatccctatccaaacctaagcttctaaaacggctagaatattactccatttgttccacgatcttattaggtttatttcttaatccaaatatcttgatcatagatttagttagaccctactagtacatggatatgatgccaacagggacaaaggcatcggtagaggagaaagacaattttcattgtgcttgaagaaggtgtgggtaccgcaaagaacatgtgggaacacattgtacgcagcctttgccctttttttcccctttcacatcttaggcagtagctagtggagtagtactaagcacttagcaactgataataattttgatctaagataataaaaatcaaaactagtgtggcacactgtatatatacgtatctagccagctagtatacatcacaaatctttttaatattacttgtaagagaaaatctactcaaataccattgatttcgtctcagttcaacaatttatcattaatattatttattttataatataccgacgactttatcatttgttctacaatatatcatcgggctaggtcattctaaaaacaccgaaaataccgttatatacatacatgactaataattgatttatcctatcaaaggttttaaaaaacttacgattttctttttgttgtatagattgattttgccattttggccatgagattttgcgtaatggtatatgtttattatatcaacattgtgaattcttttagtgttttttataattatttgatatttaaagagtgagaatcaaacgattgcacatgcacttagtgttgtaagatccaactctgcctagctagagcgatcgactagaatgacatttctttacagaaagaaaatacaaaaatctaaattacttatatctacaatcacaagatttgtgcatcaagacctcttaagaggcagttggtgagaacatgggtttctgatttctactccctccgtttgaaaatataaacaatatttatgtgtgtttctcaaaatgtatttgaacggaaggatttccaaaaacatattttctttttgctgataagaccaaataaggtcaacgacatgtattaagaagaagaaaagttacaagaaaaacacgacaaaagctatcgaggttatatgtgcaccaaagaatatgtccaagaaccacacgctaaccacacaagctagcacaaaccactgagagagaggagcctataacatcaaaacgtcccccgcaaagcgtggcaaatcatgccgagcctatgacaacatcacaaaaatgagactccgaaaatggtgccatcatataggtcatgacatcatggatgtcgacatcgcccatttaagaaacatgcggttttcacctagagaaaatcgtcgagaaagaaagagatgtaccctcgacagtgcctcaaggggttacgacgccttaagacatagccggtgctggcctagtgatccaccgggtgagacttccgtctgaacccctacaaccttgattgtatttaggaaggatgcccaaatatatatttttttcaaaaaaaaagcaaaaatacttatattttttaatagagttagcagtaatccattttttttattttataactatatgttcacgaaattaatctgggatgagaatttagattatttgagtccatctcatacataccaaattaccaatatagtaatagaaaaagactaaatcccaatacaactatttctcactttatcttttctgaatacaactatttattatttttataatgtaatgattactttaaaaataaactaaaataattaaaagagatttaaaaatgaagacggagccacataggaagtaaatccctggtatgcgtacgtacgggacgagcaagaggaggagggtgatgggcgctattggcctgagactgaagagaaggtataggtcagcgtgaggccggccgggcggcggcatagcgtcagcctcgggaagccgcatgctcgccaccatcatcgatcaccgcgttgcgtgcgttcgtcgtccccatctgctagccggtctcccggccgccctctccccaaacgtaaatgagcgcagcatgcatggccatcgccatgctagcttctttaatttcttgggcatcgcactagactagctgcatccatccaaccatccattcgagcaggtacaacatcagactataaaccaactataaacatattttaaaaagataaaggaagagagagaaaaatagcggtctacaagtctgtagccagctaaagcacgaattccaagacgtaatatgtgtataacaggtgagaccagatgtgaatagtatagtaagtaactattgtataaattggttattacattagctatagatgatttagaggtagcagtgggctatactattaaacttgctctaagaaggctgaatactgagatagatgagagaggagaggagagcgatgagaagcggactataagtttacaaccgacttagacacagtaaccaaaaaaatctatgagacagtcaggtggaccatatatttataacgaagagttaattactatatgagtgaactgagagataaactataaagatagagagagagagtagatgcaaggatgcgcccttttctttcgctttcgcgcggcgttcgcaactttgcatgcacgacgacggcagcgggcgaccaacagacaaacgcgtcctaacatcctcgtgcatgcctcttttagccatctactgttacgccaaaggttggcttagagcaggtataatagcagtctataaaccagctataaccatatatcgagaagaaaagagaagagagagaagaaagcgggctacagatttgtagctggctgcaacacggactctaatacgttacgagtgtatgagaggtaggatcgggtattaatgatgtaatatatttttataggtaactattatatgaatgagctattaaattggttatagatgatttgaagccaacagttggctaacttgctcttaacggggagcattattctctccaggtgcttaattaccttcgcctttgctaaacccttttttgatcgatcatatcttgcccatgcacacgacgctcccggcccaccaccacaccacaaggttaacagtgtgaaagttcaattctgaaaccccagccaaatcaaagagttgttcagttgactgatttttaagtaataaaagaattaggtttcaattggtcccaaaataattacaaatttaggatttaaactcgtcccaaaataagtactccctccataggagtgtaattctagagtagtagttgtgtcattggtcacctcttattcaattcttttcacatcttacccatctcactttcatccacccatcttataatgagggacatatacgttattttacctttctcctaatttgtgcttcgactcctagaattatagatattttggaacggaggtattccgtctatttcaaaatatattgcggaatttgtttttgataggataaaggtttgatcaacaattgcttatgttgtactccctccattccaaaatatatggcataactacttttttttaaagatgtttcataatataatgcgtgcgtgcatgcatgacaattaatagcacattctctctcctaaattattatttttttaaatcaatatgtttaattctattgggtgcatgtattgtattagttgggatgattcaaacaaaaaggtgataataattatttcttggtcattgagttaatggtggttgtgccttatattttggaatggagggagtacaaaagtataatcatattaaattacttttgaagatgaatataataacatcaaatttgattttcaaaacttatattataatagagtaatccttcatgaaagtgttatcctaacgaaacaaaatatcgctgtaaaaatacatttttccttgatggctaaaacatatttttcctagcagccagacatttcgtcagcaactaaaggtaagtgaaaatcaactatcttcgctggcggcatccgattgccagcgaatatcaatttttgctggcggcgacataatgcagctaccaacgaaaatcagaaataaaataacaaaaatattttgatttttttaccgggcatctgtaacacaactatgcatcctaattgacaatttaggcaaatttttagattaaattcacaactttgtgatttgtataggattcaaacgcaaagacctctctctccacacatgtattacattaccatcttactatgaagtacttattatccatagtcagaatgctattgttttgattttcattgttcgaaacttaaaattcgttttttcctctctaaatgatttcgaattaaaaaaaaagtcatgaactactttgtatctacaactttgactcagatcatatgtccataggaggttatgtgattcatatatctgaaattttgtaaaatagatcttgaatcgtataacgaatattttgaaccctacgtgatctcaaatggaaaagttttgaactaaaaagttgtagatcaaattgagattaattaacaagtttggtacaaattttattttcatctgactttatatgaaaaatttaggtacaaatatatgtttttctaaaattgattttcactaacgaacgtcttaagcatcggccagtgaaaatcgattttctctggcggacacttaaggtcatccgctagtaaaaataaacgtgatgtttactggtggcactatttttaatccgcttgaaaaaaaataaaaagggtaatgctatgacaaaatcgttttttatagtgtatatcctgcattttgaaatggagcgaatattatcaatcaccttgtcaataatcaacagtaaggtagtgcttggctatgtgttactagtacaacgctgcttgatagacccgctgccgcttacttgctactgcgaatggactagccataaagcgttgcattgtagtaggattgtaacaggctgtcgaacatggcctagatcaatatatatccaaatatttcatatattatttttttcttctttttgacacaaaaaatattctaacctaaacttacaaaaaaattgcacttgctgatttattcttgctaatagaggaaattttctatgattatataagcatatataaaaatgtgtctagattcattcatcaattaataaaaaaagaaaaaatagaagttgcaattcatctattttaaagttacacttttctatatcaaatttagtgtacaacttgtgcagctttgcttgacaccttgggaaagtataggtgacggacgattaaaaaaagaatcaggcgattgataaattagcaaagctgcggatgaaaattacttcctccttttcataatgtaagtcattttagcattttccacattcatatagatattaatgaatctagatagattaacatcaatatgaatgtgggaaatgctagaatgacttacattgtgaaacagagggagtactccttaaaaaaagtattatttaaccaccgatcgaatgccaattatagcgagtttgaagtaattatctatatttgaaatcagcaggagctactccctccattccaaaatataaggcataaccaccccttacccaataaccaagaaaataattattatcatcatgtagtttagatcgattattctaataaatacaatgcatgtatccaatagagttagagaacatgagagtggaggattttaaaaagtaataatttaatgaagaagaggtcatagttaattgcctacatgcatgcatgtcttataatattatgaaatataaaaaaatggttgtgtcttatattatggaatggagggagtagcttattatatcaaaatagaccattgtaacacttcattctaaacgtcttttttagactaaccttgtaaaacattgacccacgttactaaaaggggagagtaagtataactttgtgatctttttcatggagttgagtggcgcgtactgatgaagcgtgctagacaggaggctgctctcacttttattcagactagtagcttttcggttagttaccggcagttaattagttagttttgtggctgatatttcttctgatggtccacactgctgtttgcctgtttctctgcccaataaagctaacttaattaattccacacataacctgccattgtgtatgtgtatggttgtacacacttgtattacgtacgttctcgtacaggtacaaataataacaatccattgcatgtgtccatatgtatgcgtggaatgtacaggcaactgcagccatgcatgagactagcactagctattgtgggctcaagctagtggtactagtatattacaagtttaacatcactttgtttacataataattattactagggtcaatttgtactatattattattagcggtactatatatattaacttaacaattttaccgcacttttttcacttaattattactaagggtcaatttgtacgtgtgctatacaatacgatcgatgaggatagtaggtctcgatcttctgatagatattgataactctcgattttgtgaaaacttaataaacatgatccggcttctgatcaacatgattcaaatcctgcaatcatagcaccacgttttctttggttatcaaccgtgcactgctaggttgacctcgccgagaaggctaatctctgcatgcgaatcaaagaacacaagtaagaacaacatagattgcaacacaattgcatatgaatgattaagcactcgaatttagggtttcacaaaccaaactagcggcaaaactgtgatggcagaaataatctaagcaaaacctgactctaaactatgacgactattaaaaaaatatgatttgggacgtcctaagattgccctatggcgcacacccccttgggcttaacccacgacatcgttatgaggcccaagacccaaatcagattcggagtggatgaggtacgtggcttgttttgctgattcccgacagcttggtgcgaattttgacgtgggaccaaaaccatctgaaagtagactccataggctttccaacaagtactcatgatccccgagattctttctagatcagcggttagctccgtttgaagttaatgctgtcaagaggcccaaatccgaatccaaaacgtgtagaactttatctcttatcatctatggaccaaaagtgacgtggtgaggtttgaatggacttggagaaggtattgatttggtccccaatcaacttatttgatttatccatgcatttcttatgctcggtctcatttcttttgcctatgcaagtacctctgcaaaagaaaacacactaaactcattgtgtagcaatatttgttcaaatatataacaagtaaatctaatatagaacatatgcacttttggttgatgaatacatatggtagtcatggtcatatctgatctagttgtgtccttatcatactcatcttcttgtttggaaaccgtcctcggtttcaccttgttattgagcctactgaacttatctttatctatcacaacatcaggtaaggaacatttcttgattgctatatggttggattctgaaattttgccacttggaaaaccacagcaccccccttcttgcaaaccaacatatagctcatttaaacaagtagagaaactagatagagaattatttatacgcatgtggttctctagacaatacattcatcgtgaaaaggaggtatagttaaattcgaacaaatatatactcgatgcacattatattctgctttactattataaattgccaataacatgcaaaatcatatcagaaggacatggcaattcagatctagcaaataatttattctctaaacagttgagtggacaaagatcatcgaattgaatatagccccaagtatttaaaaaagatagtaatttaaactctttattctcgctagcaatgtgaataacatgcttaaactcaacacatgatggctcaactatataattaacatgtccattcactagttgtggcatggatataagaaaagcatcgcacaaatcttgtttatcacataaacaaagtaaattattttatgacaaaggtatttcagcaattacctaccaacttttgtactacaccatcgatcaaaaaataaaaaataatttatgactagaaatttggatataggctatgtccatattcatcgctagaaattgttttttcacctataacttttatactattatacgtactagtctattttcccacaatcattttctttacttgtccttttggtgtctcaatttgtatgaagaaatagcataatcccatgggacgggtggagtaacaagtttatgttattacaatagtacttttcgaggcaaaaatgaaatatatgtgtaccacatcttttgattttaaaataagcatttgatgagttattgatgataggaaattttaaaagtataacaccatcttatcttaaatattaaatatttttgagtagatattccaagtacatgcctctcaccccttcacttcttgggctagcttgcatgcgcgctctcccctccttcacgtacggcagcatagctacgcttcgtagtactccctctgttttattaagatgtgtcacactccactaaaatttattgtatttagagacggaaggattacatgctacgagaggtcgatcgatgagtatgcaggagcatgacatgaaaagccatgaaagtaagcagaggagtgatcgatcaagaaggtatagtcaaaaagcccgaaaagcatcgcatgcagtcgccgcctgtgctagtgtgctgtgcctgtggacgtgatcttaacctggatatggacaggattcagatggagagatcgatgagagtaacgaggccccaagcttttagccatttctgtcgaggcccggccggatagttagcacaaagcacaagcatgcatccaaaggatcaagaaagtacaaagcgattggacaaaaaccaaataaataaactcccaaaggagcgatcggaagatacgtatcaccgccctcggaaaaaaagttcagaacaggcatctatcacctgcgtccaactcgatcgatctaccaatcgaggattttttttttaaattctttaattgataaaattagaataccgtacccttaacattattttttaaagaaaataggcattttggccttggcagtgcaaagtttttttttatgtacatataatgttacatagacgacgtggaaaaatgatttagatatactacctccatttttaaatggacgacgtcgttgattttcacatataatgtttgacaattcgtcttattaaaaatataaatattatttattttactgtgatttgttttatcatcaaataaaatataatcttaacttatactattaagtatctatattaaatttttgaataatatgaacgatcaaatattgtgcaaaagttagtatatagaaagaaatttttgttcaaagggatttaaggaatgaaaaaaagtataaactgagtcagcgcaccggactagaaatgcagacatggggcagtagaatctatagtgctaggtagtacaggctcccatgttacttgctcacgccttgcttttttctcgtgcgatcgagagcacctttcgcccatgcatcgcccgccgcgccacggatcgatgctagctatagatcgatcgagcgaatagctactctactacagttcgcctgggaggaagtacagcgcgtgtgcatggagatccgcatgcagcctccacactgtccccttctctgacgaagaacaaattaaaggctgtgtttggctgcgctttagtctgtgtgtcaaattttttttaaagtatacggatacacatttgaagtattaaacgtaaactaataacaaaacaagttacagatttcacctgtaaactgcgagacgaatttattaagcttaattaatccgttattagcaattgtttaatgtagcatcatgttatcaaatcatggcgtaattaggctcaacagattcgtctcgcgatttacatgcaaattgtgtaattgattttttttcgtccatatttaatgctccatacatatgtccaaacatttgatgtgatgaaaaagttagaagtttgaatacaaaagaatagtcgtcgtaggacgtaggaaaagccaagatttcgaaccaaagttacggatgctataaatcttgaccaaagtatgtactccctccataccaaaatataagataggatgaaaacaagtatgataaggtgggtcctacttgtcatcctctatggactgagggtattttggtccttacaaaaatatggtatgaaaaaacctggtccaactgggtccaagacgtatacagtggcatggttaaaaatttgcaaaatacatatggcacccagtagatatcgggaatagtagtggtgtattttttttaatttggcaaagttgcagtggcatggatccaattaatctaattttttaagcctaaataatctataattagcacatgtttactgtagcatcatatagactaatcatgaattaattaggttcaataggttcgtctcacgaattagtacatagttatgagatatgttttattattagtctacatttaatatttttaattagtgtcaaacatccgatgtgacaggaactaaattttagtccctggatctaaacaggccctaagaatttttggactctgatccggtctctaagatactactttgattaacgatatctatagaagtaaaatgttttaaataaaaaaagttgtatattatgatagtaagttgtttaatgataaatctagtaacatcaattttgcatgattgatcttttttttattttttttattaatagtcaaaattaaaaatgtttgacttgtcactgtgctaaaaaaatgtttatatggaacggagggagtatgcagattttgtagccacggattggacctttttttaagagagatacgccttacaattttatttttatttttgcattgggatcgatgaagtgcaccgccataaaaatatatatgctcaaacatgtaagtggaggatgcatgccctttgcagtactactgatgccgcagccttggttgacatgtggatatagactcgcacgtcaatgtctactactacatcagtggtactgtagagaatctccactggcaagatgaatatttccctccgattgattaatttgatcctcggctcgattttcctcatctttataataagaatacaccaccctatttttgccaaaaacataagaaaatatcactttacgggaaagcactagttatatgatggtggaggtttgtgggctcagcagatgtgcattgacgatgtatgataccaagtgtcgatgatgacgtgtgcagcgtccgaacttagaggagggacgaaccatagtggacgaacttgagcagtcaaacgtagcaatataacgcttctaaaaagaacggttttgccctataaataatactattttaatagaaaattgtaaaaatagaagtcactcgactgaaatcacaagtttaataccctgtcgaactacatatcaaacaactacggcacgattagtactgaacatacaataatagatagcctatcgaacaactattcttcgacaggtttgttagtatatttaaataaaataaaaaaaatatgaaaagagacgtctatcgaactatagctgttcgataggtccttcgacccaactgcaatggcagcatgtgcactgcacgatgagcttttatatttttactttttagcatgtaacctctgtcaaacaacagttgttcaatatttatcttatcgaataatgattgttcgatagggtattaaatttgtgattttagtcggtcgatctctatttttgcaattttctattaaaatagtattatttttaataagttccgaagatatgctctaatgataattaccagtgcacaccgacgagcgggatgacagtacggaggaggaggcaaaatcataaattcttttacgatgtgttgcatggagagttagctcggtagtcattggaaccaaattggataggaagcgtaaccccgccaaatattacgccactccaatggagaataaataggatcggtcgaccaggggaggtgggaaaatcggtcgctccccctccccccacgtgcgcacccccactggacccacccacttgtccctccccttttccacaaaagatgtttcaccttatacttacaatgtttcactatgtatagatctaatattgcaatgaattaaaatattcttttacaacgaatcatccacatattttggaaaccccctattaagggaatttgtttcattttttttccaccaaaaatgtttcacctaatgcacttataatgtttcactatatatgaatcaaatgatgcagtgaactaaaacattccttcgctatttgctgaaacattgtttttatataaggtgaaataacacccgatttaagcgagtgaaacattttcgatctacttagtgaaacaattacgatatacctggtggaatatcgtgcaacatttacaaataattcaataatacgctaattttttccgtcagaatatatccatgtgtggtcttgttttgaagatttaattgcaacgaatttaatggtgtaatcggatcataatttggataagtaatttaagagaaaaataagtttaaattaattttgcacgtaaatcgggttctgacatcattctgacatcagcatccgatttttacctcctcccatcaggtgcccgagccagaattcgcgtcccactccaacataagctaaaattgttttttggcatgtatagtgtggaggtcacggctgacggctctacatttatggagaaatcagcgattcaggacgtctgacacgatctccctaactcaaaaccaaatcagattgagcacgtaacccatctagagttgacgccaccgattaattaatgtagcaaaagaaaacaacaaaagagagagtcggttgaccattcacacgtctttgttaatattatggactctctagttttatgtttttcttctttcaaaatttagtgatttaaacttttaaaattgataaatataaagttgtacctgtagtactggattctcacttcattatttagttttgaaattattaattagctagatgtaattgatatgtattctttattaatctagctaccagatataatctaaaataaggatcatataatgattagttttgaagtaacatataatttcaattttagatttataataccaaaatagtgggtgcaacacacgtttgacaaaccatataatgtgttatatttgcacattatataaatataacaggccatagattttttagataatgaatttttcattaatctggtctttatattcacaaaggatatacagctagccaaaagatacacgagtactacttagactccaaacatcatgaagaggaatacacaaaacacacaaaaataaaaggaaattccatttttaacttgaacagcatttcaaaatttctccattctatgcacaagctagtattgtagcttatattctgtaacaccaaacaactaaggaagcagctaggttttatgactttgtttaaaacttaaatattgttttccttttgagagcaaccccaagagggagataactctagtaatctagttgcccattacattctgttttaggggcagggggtataggagatgggggtgcccaatatataggaggggactacccatcgggaacccgatccaaacatgtaaaattcgggtgctgacgtctgatgtcagcaccacgcatgcgtgcaaaaccactttaaactaactttctcttaaattatttatccaaatcatgattcgattgcaccattaaattcgttgcaattaaatcttcaaaacaagaccacacatggatatattccgatgaaatttgtttagcttattattaaattatttttaaatgttgcacgatgttccaccaaatatatcggaattgtttcactaagtaggtcgaaaatgtttcaatcgtttaaatcgagcgttgtttcaccttacataaaaacaatgtttcagcaaatagcgaaagaatgtttcagttcactgcaacattagatctatacatattgaaacatcgtgagtacactaagtaaaatatttttggtagaacaaaaaatgaaacgaattctcttaatagagggtttccaaaatatatgggtgattcgttgcaaaagaatgtttcagttcactgtaacattagatcaatacatagtgaaacatcatgggtacactaggtaaaacatttttggtagaaaaaaagaaacgaattcccttaatagagggtttccaaaatatatgggtgatttgttacaacgacgttccataatatcaaaatccactgcaatatttgattcgtacttagtgaaacatcacgagtacactagctgaaacatcgtaaaactactggttgaaacatcaaaagaaccatatgcagcattctaaaaaaatatcaataaaaaagctaaaatatttttttgtcgaaatataatcatgtgtggtcttgttgtaaagatttaattgtaacaaatttaatggtgtaatcagaacgtagattagataaatggtttacaagaaaaaaatcttttgaagaaatgagagatgggagcatttgtgttggataacatccaacggcaacgtcacagtccgatggatagccgtccgatccacgcggctcgacctcatggcgcgtgtggcgaccgatttttcagcgcacgatcagatacgcggtacttagcgttttcgcaatatatatagatctccacaactactattattccatcagatattatggtctaacccggccggtctcaacatttcaacaccacagaagacaataactatgtcccatgaatgtgtgctatagctgccacataaagccaacaacaagctagcagagcaccatgcaatggcccggccggagacaacgcccactgtgcaaaccctagtgtgacgaggaaaacaaacagagacacgcatgatatctccttgcatgttaggtggggaagaaagcaaagccaaagctagtgtggggcactatgggtgatcacagctatagcacagcaaacgcgaacagagaacagtgcgtggctggcttcgtttgattttgctttggctgggggtcgaccaaaaagctcgttttggccatatatatgtaacgcatgtgagttgctcttgctctggctttgtaggtcctactactcctgtatgcatgcacggtacagtcgtctcgtcccgacaggaaggacgaggacagccgctattacccccactctcgctgtcaaagttgcaattgcatatctcttgcatttgcattgcatgggcatgcccggccgttgaatcttccaaaggccgtagtagtagttgttgttctgctggggtttcaaagttgtttgattttttctttcctccaaaggcagggaaattcttcgttaaatcgatcttctcctttgaaagctcttaattttgctcagaatttcacccggggtttaatttggtactccctctggttataaataggagatattttaggcaatggcatggtcgttagtgcacttgtttggtcaatattaaatatatcgtttccaggtttataataattaaaactcaattaatcatacgtaataattttttacgtgctagtatttaatctgaatctttataagattcgaaaagtagtagatcagtatgaataggaaccaattccataacggatatgtatgacagaatgaggtgatcgatcttttgcttccatccatgcacgcataagcttttttgaattgttgactaggaatgattctggaaacacacatagccgtgtatagattcaaagtttggatttaaagtttagtccttttccatcgcatcaacatgtcatacatacaacttttcagtcacatcatctctaattttaaccaaaagccaaactttacgctaaactaaacacagcctgggagtagtatgctgaagcaaaagccggtcttttggaggatggcttttaatttctctctgtcaccatcaaatcaaatctcgtagccaattctcttctcagcagtactagaacaacaacgcaggggcgccggccactcctttgcattgataaagacaggctgtgccccggaaaagtggtggtactacgctagcacgcacaaaagccaggggggacaaagaaacatcttggtgatgtaatacactcgcagtgtttgctgctgcattgccatgaaagaaaaagccttgcgtttaatccgtccggttgcattgcctgtctccgtgcagcacaacacatacattttcagaaaccaaacagtgcatgtacaattgcatgcaacttttcatcttaactaggaaggtagcgctatgtattttagactgtgtttgaaaaacttacataggtggaatatcaaccgatgacacctgcaagtttttcaaaagtactacttcgaaaaacttatattgccatgattgaaaaacttgtattgcgcgggcatgtatttagattgcatttgaaaagcttatatacgcggaatatcaaccggatgacacatgccatgtttcaaaagtactatttctccgtaatttttcttcatcaacattacttagataatttttccatgctatttgttagcttttaaaatatataatatttaatccatcggtataaacaattatgtatgatctgtataaacacctgcaatgtttcaaaaatacctatttaatttgtttgaaaaacgtgcctaacaaaataaacataaagtaaaatgttttgtcttgtttaattgattgtttagtggccttttttaataaatcctaaagaactattattgttagtaaacatgctttatttgtaccatcaagttagtcatctttttagttggttcaatatgcatgttttacatacttacatataaattaacaaaaacatatcttagaacctcgcttccttttaatatgtgtgatctataggaaaatatagtcgacatgagtccaaaaatttaaatataatagtaacaaatataaccaactatatattaatatcttagtgtggcttaatatgcagacaaactcgtaataatatggtattggatagatgcaagaccactaatatttaagcatttaataattgttagaaaaatggaacatgtaatggttggttcaattttagtgaaaagttcaaacttatttgattttctccaaatagttcaatttagtccctattgatattttaaattgtaaattttattttattccagttcaaaatataggggttatggatagagcaatagtcagattaaaaatcaaatgtgtagcttaaaaatatacatgttttaatattattgattatttcttgcaataaaaaattgatgggtagaggagagagtggtgagttagagctgagaggagaggggacgggtagtgttgtgctgtgcatatgtgacgggagggcgaagtggaggggtgttcttttcctaaatgatttaagtgaaaaccgatgatttttttgtcaaaatttctaatatccttttttttctaaattttaagacgtagcgcatggcggcttaagattttctctaaaattatatctactggtaaaaaaatggatccacctattaagtggaaactaatggtcagatgtctttatttacagtttctgaggttttatttttaattaagacataacacgtgacacatacagagaatgcacaatgatttgaggtcatataaacctattgtcattttttatttataatattctgtattttttttctatttggttatcatgcaaagataggtgtgtatgctcaaatggtgtatttttagttttatacagtgaaatatgaataatatgcgtcttgaattttttatttaattataaataaaataacaattcaaataaactaaaaatcagatataacataagaaaaagtggattaatctgttgtaactatgttcttttctattttaataaaattatattaacatcgggggcctcccctgctgtgttctcttaaaaaatatataacataagaatcataattatattgctttgtaattattgatctttttgtattatgttgtcaattagttagaaattataaggaggagttgagtgagaaaggaaaagaacacaaagtagaaggggacaaagtacacccacatataattatattttttacatttgtagtgttttagttaccattactttattaactaaaaatagaataaaagttttattgattgattaagatatatcatttttactcatcttttcgtatataggagatactgaaaatatgaacactacagatttactaatgttattttggatttattataatatcaaaatgggaggagtaattttttggaacaatactcagagttattagatttattttacttttgtcattacatatctaattgaattattccgaaccgggagaatagagacattctccagtagtgtagttgtttgaatggcacacaaagccagaaaatataaccccaaatatgggtctttaaatgtatagtaatcaaaatacataagcagaaatattatttatctgatttagggatccatgatgtagatgttatagttgcttatttctttagcataactcttgctttctaactaatatattttggtatgtttatttttacctttatgattgtagatattatttaattattatgaagttatgcacgatgattgagtctataatatcattattatttcatattttttataattgcttgaatggcacgtgaccgtctgaaaataaaatccaaattgactttttttttctcaaagttgaattatagtgaacatttggctttagctgtaaatttagtcataaataaatttaaagatataagtggatcaaaaaatagttctaattagatgttatagttgctgaattgtttaacaccaattttttgcttttgtaactaataaagtatgaatagaagaaatatgtgcaatatgaaaaaaattgagggaagaaggggtggaagtacattacgaacgtacgcacttgttacctgtaaaaagaaaacgtacgtacgtactgtacgtataggcctaggtggacccttgattggggttagggagtttttttttctttagataaatctaacggtggtaaataatgggtccacctaatttaatgaaaatcaatggctagatgttttgtttttatttcttagaatttttagaaatttctctaatttaaaatgccatgtcgtggcttaggagcgtttgtaggacatttaaatttcctacaaactctcctaggccgtcacgtggcattctacaatcccatcgttgattttcatttaaattggtggacttgttattttagactgctagattatatctatttaaaaagttctctgtcgattttcatttaaattagtggacccattattttagaccgttagattatatctattttagaaagttatttttaataagataactgatgttatcatcatagattatatattgtgttacaaatattatatataaaattaaaattatactcttcatagactacattaaaatccataaactctagactacattgaaattactcatcagattatatgtaatgggtcacaattatgctcgttgcaaattaagaatcccatataattgacagctcatgccatcctcatatttcaaatatatattttttcctgtaaaatatgagacccatgaaaacacattttctatttacggtagcatcgagaccactcctttatataacagtgattgtgtgttcgctcccggctaaaactctatggaaaaacagatcttttgactccacggtaacaaattatggtgtgtatttttaactgccttaattaattaggaaagaaaagaagagattgatgggggaggaatttgtacgtacgtacgtacacatgtggtgacagccaaggaaagggtgagggggggggggggtttaagttttgatctaaaggttaatagtatcgggtccaccgttttaaatgaaaattgacggtcagatatttttcttttttcatattttttctctaatttattaaagcgccacgtggtggcttaggagcgtttatagggtgacacatggcggtttagaagcgtttgtaggaagtttaatgaacttttagtatataatatatatgactaattccaggtaaagggaaagtacttactaacattcacctatactaaactttagtagtgaatgacttgtttgccatagaagttgaccagatgcttctgttaattgcagaatatgtctctgatcaaatgatcaatacgtattgtgcttgatttgggattgttcaatgttcatttgggctgaattaaccaggaaagggagcacaatggacaaggctcaaatatatgaatggaggagctaccactagctaggtgaaaaaacatgcatgtacaacgagtaatgcatgagtcaagctaccagcggcatacaagcaagtcaaagaattcacatcaccaacagattgacaataaactaaactagacaggtgaaaaataaacaaagtggtgagctagtgctaccccccaaaaaaacataagtaaaaccgagtaatattgggttggaaccccaaaaggacctcattggcttggaagtggcctagccttccttccctgcccccctaaatttaccattgtacccctcaccctcctctctatatatacatacccagcacccttcactcccttctccaagtgttcaagctcacctcagttgattctagcttagcaacacacaagcacacagctagctagctcagctctctgtgcttctctagctaagctaatcgttttcaggcgaaggaagcacacacatctccatttgtgcatcagatcaccggccaggtcgtcggcgagaatgcagtacggagcggcggccgagcaggcgtggtacatgccggcggcggcgccggcaccgatggtggagagcgcggtggcgcgggtggagcggctggcgtcggagagcgcggtggtggtgttcagcgtgagcagctgctgcatgtgccacgccgtgaagcgcctcttctgcggcatgggggtgcacccgacggtgcacgagctggacctcgacccgcgcggccgcgagctggagcgcgccctggcgcgcctcgtcgggtacggcggccccgccgccgcgtcgccgcccgtcgtccccgtcgtcttcatcggcggcaagctcgtcggcgccatggaccgcgtcatggccgcgcacatcaacggctccctcgtccccctcctcaaggaggccggcgcgctctggctctaggcctcgcccgcccgccattggcgtgctctggcttagcccccctagtatacctagcacgcaaaaagctttacctgctgctgctgctgctgctgctaatgaagaagatgaagatgatgatgatgactagcaagtagttgattgatttagctgctgctaataggatatccatcgatcgagatacagcccatttacacggtgctagctaattaatcagtgtgtgagtgagtgtgtgtttgagagtgagtgagctagagctagaagaagagagatcgaggttggtgtgtgtgtgcttttttcttcacgacgactgcctctgtccgtctcgtgcatgcttcgcgcgcgcgcgcgcgcatgtggttgtttgttggcgcgtgcgctggatttgcttgctttgatgctgcatgctattgctagctactgaaattactactaccagtgttttatttatttcatctccccttaattaattctgcttatttcgtcaaaactatctgagtctttgaccatccgtcagtatgtatggtaaattaattagttacagttcgaatacttaaactcaacatagaaacagtcagcatattctcatcgccatctgaaactgaaagaatgaaacattctcgaatctagttcagaatgagtgcagagcagaacagaagcatgtatgtagctcctacgacattcctgctacttttgattatgcgactatcaaggctcaacaaacagtgcaagaatcaatcaaatacactaaactactactgcccttttatgaccacgtttaattactatagtttttttttctttgcttaattcatttcttaatgtcttcactagctagctgggccttcttcccccgttctgtttttgttttctcttcatctctccgttcgaggtaacaactctgcactgttttacgtctcctgtgtctgcttgcgtaacgtccttttgcttgtactgacggtctctcctgatctcctatccgaccaaacaaattgtactttgaagatactctcactttgcagtagtaccaccaccgctgcataaaaatgtagcatgtacaaggaaaaggtataggcatgcatgcatgtaaaagctaaagtccaaagatgtagttacatgtacaattactgttactgacataacaaaaggaccgtggttaattaacatgatgacatatggagggcctaaaagtgttgatttggaaagatctatcggtctggatgtggatcaaaattattcccatgcaaatcgcaacatctgccgcctataaaacctatcattacgtaccttggctatcatgttggtcgatctggcccccacatgggccattttttttttgccagctcatcgatcgtccccgttgcctcatgcatgcggtgagcttaataaaatgtttctcttattatgatctttgtgttatttatgatctcctagaccagagtgctaaaggacacttgcaaatgatacagaagaggtcatgctaggtgcctaaatcataggcagtttgtatgattgttagggatttgtgtgactgcagcttaagcagtagcagtatatacaaatcgggtggctcaggtcacacacggtactgttcacagtactgtagcagtaatactgtagcgttgaatactgttcacatgggtactgtagctttagatatgaaccgttgatcataaaaatggatggttgaagttgtgtgcaattgttaacttgcagtccctatcgtgactgcactggatcccaattcgattgttagtcgcaggcatattatcaatgactgtttatatagaggccaaaaggactattatttgctactccctttgtcccataatgtaacaatctaggtcccatactaggactacgaatttagacatgaccctcctttcgtcctataatgtagcaacctaggataggattagactcatcctaggactatgtgtccagattcagtcctaggatgagcctaatcccatcctaggttgctacattatgggacggatggagtatattctttttagaaaatcaaagaaattccatcgataaacgtcccatctaaaaagtaccatcgacgaacccaacttcccgaaaatttcatcgtacaatctttgttccaaaattatcatagccgtcaggttttcgttagcattcctccgttgagggatataaaaagaccattttaccattataaattgttgaaagctgattaaaacttttgctggaaacagaaacgtacaagtttatatatggaggacgaaatgtacaagtttatcaattgtctcagcaaagtttcaactgctagcacagagtgtttaggacaaagtggtcgtttcctcctggaaggaaactctatcgtcctccctaagatgatctgtaatctgtattttttaatctcaaactgtgtaaactctctcttacgatggtttatggaactcaggtggggattcccccccccccccccctctttctttttttaaaaaagtttaagcggttagcacattaaataagggggcattatcattacaaagccaagaatataaatgtttatattcaaggacggagaaacaaattcttatgagtaaatggtactccctccattccaaattgatctacatatttcataggtacactaagaccaagaaatactaatatctctctcatactgtatttactctagcaacaaattcgatatatgcaccatccccactattttctagcaaatagcaaatcaagatattgcatgtgggttatcaatacttgtgtgcatggatgcatgcatcaatgtccatttactctaatgcacaaataaaataacgaatagacttaataaatgaacacaaatatgtagatcatttaggaataacctaaaaaaaattatatgtagatcaatttggaatggagggagtattgtacaagaatattatattaatatatggagtatgaattatgattgacgaacaaaagcaaattaaaattatcgtgagacataggtggtgttcttttctcctgaagatgaagatgaagattatttttttatgcaaaacgaggtggtattaacgtactccctttattcctaattgatcttcatattatatgagtgcaccaagaccaagaaaatataataactctctcatgctacatttactttagcaataaacttgatgcatgcacaatccccactattttctagccaatagcaaatcaaaacacttgtgtgtatggatgcctgcatcaatgctcatttaccccaatgcacaaataacgaatagacttaatgaatgaacataaatatgatgatcatttaggaatattttcaaataaattatactcccttcattccaaaatataaggcgtaaccacacttgactcaaagaacaagaaacaattattattatctctttgtttgaatcaatccaactaacacaatacatgcaccctagaattaagcatcttgtgagtgtatgatttaaataataataatttaggagagaagagatgctaattaattgccatacatacatgcacgccttatattatgaaacatctttaaaaagtagttgtgtcctatattttggaatggagggagtacgatgatcaatttggaataaagggagtatgattgattgagttttaattattacaaacttgaaaaataaattaatatgatattttagagcaacttttatatataaagttttcgcacgaaacgtgcagtttagcagtttaaaaaacgtgccatgaaaatctttatcttaatccagctcttgtgggagaaatgagccggaccatagtaacctttgttgtcaatttaataagacgaatcttgagacaccttggatgatcaatccaaatatatagtgcatacaggagtacaaattttgcatccaactaaaactgaactcgttaaaatatcagtaagctacaacctccattttgaaatataaagaatttcaattgtatatcttatggctgggtttaattcgtagtactgctagcaggatcgagacagacagactccagccacacccttgcagtactccagcatcgatcgatcgatggatcatgatggagcaagaaacaggaacagcaacggtatgactgccatatttatgggtgttgggggaaaagggcgcaagggctccggcgaatcggctttcggcacgtacgatatgatcgatcggctccaaaaagggctcacatttatgcatgcatgcggccgtttgtacgagtgcccctgcacgtatagggccccctcctgcctaccgggctaccggccggctgggcgcgcggctggccctactgtactgctgcgctgcgattcaactctttactcttcttcaattgaactgaactgaactgaattaatactgccgacaattacgtccaacagtagtgataggcagcgcatgattttgtttgcatgtttcttgcttaccagtccctatgtcacacgtacaattaactggatctgatccgagagaatttccaacaacctctctccgaatcactgtttaagctaaaattagacaattctaacgaaaaattgtgctcgaataatctcgccaagtggattgctaagccatccgaccgaccaaatgtctctcctcactgaccaaatttggccaaccaaaatcacttgccaacagtgggccacacgtactatttttccttcccacgtggctacgcccctcttatctttcttgtgctccagcgtctgtcaatgaccgacttcgcctccatcaccaaagtgtcatcactttacgttcttcagtgccggctatcaaccacctcctttacgtcggaaccccgcctcgtcgatcttcataggcatggacagcagctcgaggcacatccctgcgacttgcctgacaccggctgtgggcacgcctgcgacaagcaggacctcagcgacacccgtggccatggatagggacggcatcaacacgtgctcctatggcggcgcggatgggaagtcatcttccttgccgtacgccgtcttcgcaagtcgctgcacatagcttctttctacgtcttccttgcccacctccacaccttagccaacaagctcttccccttgccgtcctcccacccatcctctctgctgagcacatcaagctctctagggcaaggggactaggtctctgacttcgatgtaggtgggcacctggcagccatgtggcccgatgacatcatatccacggcatcgagcggctcctcatgctacaatccgtataggagaactctcactatcgatttgcactatcgtccccgcctccggccccacctagcgccaccgtcctaaactccgacccctcctagcgtcgctgtccccacctccggttctctagcttgttgggtagtaaaaagggaaggaaaaaaggaactagaggttaatatatgggtcttgttatttttgatagggttaatagagagacggttggagtgagcaataagtttaacttgttaaatcagttggagagctttgaaaaactaaatcttgatttgatttaggtagattattggagctgctctaagatccttatttacacaaatgcatactttaactggagttatcacgaacagggtactctgtatcatgagctgcagggtcggtatgtagtagtccgtgggcgatcgtccataagaataaagcaggctggaagctaggtgaggagggcatggtcctgcgcgaggcgatcgaacttgatggacaagaagagcgcgcgcatgcatgcactaggaatgctgtgctctcaccggggtgacgcacgcatgcatgaacttgatcagtactgacgccacgtcgtggatcgcctcaccgggccggggtgacgtcggcacgtaggggtagtagtacgtcgctgactttccgctggcctggcctgcagcgcaggcgcgtagaagtaataccgatggatcgatcgacgtgacgacggctttggcggggcgacagggctggtcgtggctcgcgggacacgacggcgctgtctgcccccaccttgcctttcccgcggggcgcagcacgcgccatcaactcccggatcgatctctctctctctctctctctctctcgccacctggacctcaccgccgagccgacgtgtcgcgtcgcatatttgcatttgatttcttttgcatctgcaccaccatggaacagtagctgtactagccctgttgtagttgtaggtagagaggcgtagaaagagagctccacgatatgcacgcgcgttcgtacgcatgtgcagcacaacagctcggcgggtggcgccggccggccaacgcaagcggacacaagcgcggcgccggccggccggccgtggcatttttgccaaaatgcgccaaccgacactcgcacatggacgaccgcacgcttacggccgccgcatgggacgcagccacacgtaccgctgtcaaaattgccattgccatgcccatgcatcgcgcgcgcgcgcacactcaacgcacctctcccgaggagcagcctttctcgcagacgagtcacaggttactcctaccaccccaccagcgcactactcctactttgaccctgactctgacctagccgcaacgaacgcatgcaaagcacagccacgcgacaagggcatggaacaaattaaaggaggaagaccggcagcggcagcagcccagcacgcaggcggacgaagcagcggcagcgagcgtcgctggctgggcggctggtggttgccgccttcttctttttctcttttttttttctctctctctatctctctcggccgccgcgcgtgcatggcggtttctgtcgcaggcggtaacacgagcggcatcgcgtaagcagctgtaggcttgcgcttggacgcttgcggccacggcatatcggcaaaccttctcgtggaatctgtccctgatctctttattctttgtgatatctgtcccggcctccctctactacttctttagagcaagtttaagtttaatagtatcgtccgttgatgggttaaaaatttatacacgtaagtaatagatgttactaatagatgatacgtataataactagctgttaagttacctacccacacatccctaagcagttgattttttttaatgagacttgtttccttctactcaatctttgatggagcaattgttaagttattgggcaaaagctaggactgagggctggttctcaggacttgcatcatttcctgtgctagagctcggcgattgcattagcacccgctgtcttctctctctggttttctctctcttccacctatgatttttatgacgtggatgcttgtgtcgccggcttatcgtactttattatacctgctcttaaccggccttgcttgtcgctgcgcacaccctgtccttatccgcttgtacgcgcccgtggaaaattcgagttaatctcgatcgccgtgtgcccgtgtctaaggtcagtgcaagtcaatttctcctcagcgtcttgatctcatatcttcttttcaccaactgggctttagtatagttctggggcttgatcgacgtcggcacgtacataatctcattggtattcgcaagcggaacctaagtatgagactgtttagatcttctagtaaatgtttggacatatatatattaagtattaaatataaaaaagaaactaattatacagattgcgtgtaaattacgagatgaatcttttaaacctaattgctatatgatttgacaatgtggtgttacactaaacatttgctaatgacgaattaattagacttaataaattcgtctcgcagtttacgggcgaaattaatctgtaatttgttttgttattagactacgtataatatttcaaatatgtgtccgtatatccgatgtgacacggcaaaaattttcacccctaaatctaaacatagcctaaatacaaagattctcagttatattttctcatgatttagtaattcctggattcggtattaatagtcagcagcaggtttcttattttgttgattcccttaacttaaaaattcagattcaaattaataattatctaggcatgccactcgtgattaacaaatataagttgcgaagtgactatagctcaactataagtttattatggtggaactatcctatcaaattcaagtcctatagttaacacgagtgcttttatttatggttaattaatttttaagtagtacgtgatgtacccattaacaataaagcgtccgtggtgattttgtcaaacacaaaatttgtcggtccagtcttctgaagatactcaaatggataatgggtaggatgtgagtgtgtgtttatagggatgagtgtgcgcgtgttttgagcgtaacgttagtactatgtttctcaaaatatagtttatgtgataattgtcagtgttcgtgcacccatgcttttacaagcgaatttctacgttgaatttttgtgacgctcccacacggtacttgcggttatatctttgtttttagtttaaaacgtactttaaaaaaacaccaattttgtttaaaaattaaaattggtacactatctagaatatgagcagcacattttgagctttattagactaactagaaaggaagcccgcgcggatacgcggacaatttatttattgcctataaaaagaatactaaaagaaatcatatctcgccatattcactattcactataagaaatagaccattaatttttttttaccttgaatagaccattaattttgatgtagtaaatgatcagaatggctatcatatccaaccaaaaatcattttatcccaattatatataaattcaccattcgccataacttattaccattgttttgaagtatgagtgtctttttaatcgatggaattgcagttacataaaaaatacccaatacatcattaataccataaaaagttaatatccacatcataccaagtgccatgtctcacaggtccaaatctatatataaatatttaaaaataccgcttctaccaattaataggataaaacaattaaacttatatatgaatatgaatgctcctctgacgatcggatgaatccgactatagccgctaaggatttagctctaatgccttgattcatgggtcccgcattgatataatcgtgcttctcaatggtaacataattttatcggtaagtagcaggccagttaagcattattatcaacggtagcatcttactcggatcaccttaaccgaataatgtatactcctatataattactataatgtagccagttgagattcatacttggcatcttttatggaagaagtgaaacaagatggaggtgataagaaagtctttatgtgtcttagagttgatttattgtatagggtagacataatttgtttaagcatttaatcaatagtactaaatttcagtagtatagatattttttttaaaaaagcagggttgatcattcgactatctaatagctccagtgatgaggaccacgtaaaaaatatttgctcacgcagttatcctatgctaacttacaagttaatataagttttgattttttttcttatattatacatctaattcacctatgcatgtacacgggggttaatatgcgttggaatttgagctaatttgttaaaattatttggatgaggatgacataaaaatagatataatgtagttatatgttgtttttttttctagcgaatattagtctcttgtacatacgtttgtttttcctttttctgaatgaatatttttctaatatagggatatggtgcatgtatatgtattcatagtgtgcatctgcacatatttatatgagctcatatgattgacttttacattattagtaaaaaaatactttaaagaaaaatgacgagatgggagtgaagcaatgggtggcgtgaggcagcgccgcggcatggcttgttttaccacctcgctaggagcggttgctatgtttatatatcctcaatttgggaaaatcttagagctggaaagaaagagaaaactaccagataggacgaatcacatacacacactcttccttttttttttctttttatatctcttgtgtacgtaattatataggagttgtgtacgtatgtagagacatattatatggtttttaagacagagggattactttaatatatctaatttaatttaatggttgaaagtaatggatcatcgatttaagtgtaaatttatggatagatgtttacttttttatataactttcatagattctttctaacttattagagtatcatgtgatatcttaggagcgtttatagaagtgtaggaatggtattactcatagttgtaatctacttgtagtcaaatattgtttgcatcgtctacttactctatagtttgttgatggttgtgcacttagtatcaccatttattttcggtgctggatgacacacgtgctaattagatatcagctaatttttaggtgcattgtgcatgaatacctcgtaaataatattatttagcaattagtggatagtggcttatatatagaacttacatatatggggatcagtgaggacataagtttgatattttaggctatggttgaccaagtatacaaatatattgtgtattatttattaattttttaggacctaaataatacatttaaggctatgttctaaggcgtttatcggattggctactcccttatttatgtcgagcatgtttcccgaactactaaatggtatattacgtggtgcatgtattgcaaatttttttatataaaagttttttacaaataaaataaatttattatcatttttaatttaatactcaattaatcctgtgctaatgacttacaccattttgcgtgccctggaagctcacacaatgagcttgatcgaacgaagtctaaaaagtgggagataaaggacaatgacacggtgtcaaaataatatgtatttgatatttagtatctaataatatataaataaataaaacacataatacattatataattgttggattgctttgggtcggtttggcacaaagtggaactacaaattgaaatgggattggatcataccttgatctcctggagttcccatctctctgtctttgttcttctttcttctcttctagtttggaagcacagagagaatcgtgtcttggttcttccctgtgtttcagtgggttgcttgatcgggtagcgagagaaatctcttaaggtttaacacttaggtattgatctctatttatagccactgcacacaggggaaaccgacactagggtatggcggttatcccccgatcagggatgttcatgagagatcgatcactgtagcgatcgccctaaacaaaatatctctttgccgactttaggtttagccgcaagatcatattttgtgttcacactaacattctcccccttgatcgtgaggctaaacttataagtccatctctcaataaaatagtataccaagacaaaaggattacagtgaccaatataaagcatcaaagaatccagtgactatagcataccattatattttaaaataaacttctttaatcttacgagctctttgaacttattacattaggcttatacaaacttatggactcacttttcaacaaaacagtacatcaagacactagattacagtagccaattaagcaccactgaaccaagtgactatggttcctatttaattacaaaatgagtccgccttagttttatggggagtcagtgccatataggttccttcttattccaggatcgaaggtttttctaccaaacccatgccggcaacatgttctttaaatacagcgggtggtaggccttttgtaagtggatccgctaacattaacttagtgttcatatactcaacgcttattgtctgatcctggatcatttctttcacaacatggtacttgatatcaatgtacttggcagaagcacttgatttgttgctactcgaatagtatactgttggtttgttatcacagtataatttgagtggttttgatatactgtcaaccactataatttgagtggtttgttatcacagtataatttgagtggtttgttatcacagtataatttgagtggtttgttatcccgggataaagtttttcagccatattgcctgtccagtagcttcataacatgccacatactcagcctgcattgtcgacgatgtagtaactctttgtttggagcttttccacgatacagctccccttgcaagggtgaatatataacctgacgtggatttcttatcatcaacacaccctgcaagatcagagtccgaataaccaacaacttcaaggttttcagactttctatatgtgagcatgaggtctttagtgccttgaagataacgcaaggtcttcttagctaatttccagtgttctagacctggattagattgatatctgccaagcatcccggtaacaaaagctaaatcagggcgagtgcacacttgtgcatacattatgcttccgacagctgaagcatatggtattgacttcatcagcgcagcttcatactcattcttaggacattggaattttccatacttatcccccttcattataggagcaggcgaggctgaacaattatgcatattatatttcttcagtaccttttctatatatgctttctgagataaccctaaaacaccatttgatctgtctcggtaaatctctatacccaacacataagtggcttcaccgagatctttcatttcaaacttagaggccagaaatttctttgtttccagtagcatatttttgtcattactggctaagagtatgtcatcaacatataatattaggaagatgaacttactctccttaaacttagtgtatatacagtcatcctttttattttctttaaaaccaaattgtcttatgatttggtcaaactttagataccactgccttgatgcttgctttagtccataaatcgatttctttagatgacatcccatatgttcttttcctttcataacaaaaccttatggttgtgccatgtatacatcttcatacagatcaccgtttaggaatgccgtcttaacatccatttggtgtaattccaaatcataatgagcaactagtgccataataattctgaatgaatccttagtagacactggagaaaatgtttcattataatcaatcccttctctttgcgtaaatccttttgctacaagccttgatttgaacctttcgatatttcccttggggtcacgtttagtcttatagacccatttgcagccaactgttttggctccttcgggaatttctactaagtcccagaccttatttgtactcatggatttcatttcatctttcatagcttttagccattcagatgaatgttcactcttcattgcttctttaaatgagatgggatcattatcaagtataggctcattcacctcttcactcataggttcattcacctcttcattcatgtaagtgacatagtcacttggaatcgctgactttctaactcgttgtgatcttctgacgggttcgttattttgctcatctatcataatctggggctgctgagcatcctcattattctcatcatttgatacactactagaagtagttgcaggagcttcagcaggtgttgcatcattatttctttctattgaaggtgcaacatgagtatgtgttgagaaaacgggttcttcaattataggcattggaacataattccgtttctcttccagaacaacttctctgggtgtcatactccccttgattatgtcattttccaagaacacagcgtgtcttgtctcaatgaactttgtaaactgatttgggcagtagaatctatatgcctttgacttatcaggataaccgataaaatgacaactgattgttttgaggtctaattttcccatatttggattgaaaacttgtgcttcagcaggacaaccccacacatgaaaataatttagggttggtttcttcccagtccataattcaaaaggtgtcttagggactgatttactgggaaccctgttaagaatgtgtgtagctgttttaagagcttccatccataactttaccggcagagtggagtgacttaacatacttcgtaccatatccataagagtgcgattacgcctttcagctactccattttgctggggttcacccggtgctgagtactgggccttaatgccactttcctgtaagaacctcgcaaaaggtccaggaatttgaccataagtagtatgtctaccatagtattcaccaccacggtcagaccttacaattttgatctttcgatcatgttgattctcaacttctgctttgaaaattttaaatttgtctaatgcctcagatctttctttgattggatagatatatccataacgagagtaatcgtcggtgaatgttatgaatgaatcaaatccatccactgacttttcattaaatggaccacagatgtctgtgtggatgatttccaaaactcccatacttcgatttgcacctttcttgatttgcttggaatattttcctttgatgcaatcaatgcagtgatcaacatctgcatctgagaagtccaaaggataaaggatgttttctttaatgagacgctcaattctccccttcgaaatatggcccaaacgatagtgccataatttcgaagaagtctcattatcgttatgttttcgtttggtactgacatttgcatttgaggaggaatcaacattataggtggcatcgcacacagagatttgataaagttgttcccatccaacggcgagaccaacctctttattatcatgcataattatacatctattgtttccaaaagtacaatagtaaccaccattatctaaacgtgaaactgaaactaagttccttttcatagagggtacataaagaacatcatgcagctgaagtttgaagccagtatgaagtgtgagagtgaagtctccaatggcctcaacttcagtttcaactccattagcaactctaattcttctttcccctcttcttagggtcctcctcatagcgaatccctgcaaggaatttgcaacatgaattgtcgctcctgagtcaatccaccaagaattggtggcataatcaatattcagggattcatcaacaaaagaaataacatcagtacctttcttactgagccatctcataaatccaatacagtccttttggcggtgtccactctttccacaaaagtagcacccatccttttcttttcccttttcttctgtatagggatttcctccagatttattttgctgggattgattcgaagattgccctttttctttaaattgaataggcttaggcttcaaatactccttcttaaatttcttataccttttcttctcggagtgtttaaataaatttgcatggtcaactctttctgccttaagcctttcctcttcttgtacacacatggctattaattcatcaatgccccacttgatcttcattgcattataattgatcgtaaatggagaaaactcctgaggcagagatgacataatgaaatggacaagaaaacctttagagatttccatttccattgatttaagcttagaagccatgtgatatttcttcataatatgttccctcagatttccagtaaaatcatatctttcattgaccaatcttttaataagagtggtggcataaaccttagaagagcctttaaactgctcctcaactttagcaagatattctctggctgtctgagtatctggaactgctcctcttattgcgtcaataatggagctcttaataatcataaggcatttacggtttgaaatatcccattttgcctttacttcatcatatctcctttttagggtctcataattttcattttccggtataggctcaaccggaggatcattatggagggcataatcaatatccaactgagctagagtaatttccagcttctccttccatgaagcataattacttccattaagttgttcaatattgcctattattccggcaatttgtgaggcataagatgctgcataagagagaatcagcagctaaataaataccttcttttattgattaaatccaaaacggctttggccagagaaggaaatgaacaataaaattttgtgaataagtatttattaatcagctttggccagaataataaatacaaaccacactttatcagtttgtttaaaactccttttattaattcaatcaaaacagctttggccagatttgaattgaattaataaaatttttgtaatcaaataaaagtcaatcagctttggccagaatgacaattatttgtcacacttaattgtaatatttatttgtagcggaaataaactcataatgcataaaacaataataactttaagtaataaatataatataatgatcataaaacaaataaataaatgaaagtgaattttatcacataacaaagtcacttattattcttattatcattaattaaaacataataaaatatctttaatgtttgaacacaatgatcataatcataattctttaaaaggaaaaaagttaattgtaatattatcttagcccaatctttaattaggcccattactatacagcccgttactatgcagccacacatttttttaatggaaatcttgagctgggcctttctccccgagccaggccgcattcggcctggcccatcacagccgcgccgcctcccgcctgggctccaggcccatcaacctgggcctgggccggcgtttgctgcctctctgtgcggcctcatcagcccgcgtcgggagcgacccgatccgagccgtccatcttcatcggacggccgggatcgctcccatgcggaacaaaaccggcgcggcggccgcccccgcgaaaaccctagcccccattctctcctcccctctttctctcacgcccgcggcgacggtgagcgagacgacgacgacggcgaagcggcgcacgacggggtggagatggcgccgccgagccttgctcgccggggctgcgtgccgccatatccggcgcgcatccccgtcgagcgttgctcgacggtgccctaagtagccggtcgctcgcgcaaggaagacccacggcggcgacggcgagacgagcggcgacggctacctcagcgaggcggcgacggtgacctcagcaaggagcacgcgaggaggaggagccgggccggcacggcgggtcgcgaggccgctcggggaccaagtcctcgggtgcgtgctcgcctcttattgcgtcggggcgacacgaaggtcgccgccggccatcatgcccttaggtaagcccgccgctctccttttccccatgattttagggttagggttccatgatttggggaatttttggggtcttactgcagctagggtttcggttcttagggatttgtttgagatttgcatgaatttttgctttccccttcttctaatttcttcaacccgaaaccctagaaggcctaattccatttcttatacttcgggattgcatgatttgggctcaattcaacattaacagagggatttgggcatgaacacgaagaacaatttgaacataaacacttattgagttccaatttgaggccaacccggtgctctgataccattgttggattgctttggatcggtttggcacaaagtggaactacaaattgaaatgggattagatcatacctttatctcctggagttcccatctctctgcctttgttcttctttcttctcttctagtttggaagcacagagagaatcatgtcttggtttttccctgtgtttcagtgggttgcttgatcgggtagcgagagaaatctcttaaggtttaacacttaggtattgatctctatttatagccactgcaggggaaaccgacactagggtatggcggttatcccccgatcagggatgttcatgagagatcgatcactgtagcgatcgccctaaacaaaatatctctttgccgactttaggtttagccgcaagatcatattttgtgttcacactaacaataataattaattcggtttttatcttgtgtgcacgaaaaagagaaaaaagaaaagaggaacgtgggcccagtgcatgaagtacgtacgttcatgcacgtatgtgggccttttaaggatagattaaattggttgttttttttataatctagtggttaaaaataatgggttcaccagattaaatgaaaaccgacagttagattttctttaatttctctaaatttattagagtgccacgtggcggtataggagtatttgtagagtgccacgtggcggcatgagaatgtttgatttttaggatttgtttagtatggatgtgagatataccaccacgataatacctagagcatcatgttattgtttatattttgacaaatatgtatagtcaaatagttctaaaaatacaaaaatactttgagaatcttaatcacaaacaaattataatttaattagatcaacttgaaaaacacaactaaattgtgttgtttttattttttaagtatgtagatctaaagtagtgttgtatatttgtgaagtgatatttcacttcctaaaatgtgatgtgatttttttaaaaaaaactatcatacataggtcggcctcatgtgttggtgttgtggtgtattgaggaccataatataacttttataatttaattaaagaaatacaacatgatcaccaattggatatataagttaaaaaatattttagaaggtggtttaaagaacatttattgggtattttatatttttaattatagatcatagtttaactatatttattatatatatgtatatatatatatatatatgtatgtatgtatatgtatatgtatgtatgtatgtatgtatgtatgtatgtatgtatgtatgtatgtatgtatgtatgtatgtatgtatgtatgtatgtatgtatgtatgtatgtatgtatgtatgtatgtatgtatgtatgtatgtatgtatatgtatatatatatatatgtatatatacatatatgtatatatatatgtatatatacatatatgtatatatatatgtatatatacatatatacatatacatatatgtatatatgcatatatacatacatacatatatatacatatatatatatatatgaactaatatatttcatatttatattgtagaaaataaccgtccatttttatagatctatattttttggctgtcttttctatctacgttcttattgtttttccattccgtgaacagtagaagtttaaatggacgtgctaatcgtacgtcgtacatacgggagaatggtagtagcgcttgtatctaaacaggtggaatggtgtgtttagttttcgctaaattggaagttttattgaaattagaacgatttgacggaaaagttggaagtttgtgtgtaggaaagttttgatgcgatggaaaagttgaaagtttgaagaaaaagttggaaactaaaccaggccgaagttattatttttaatgatagatctaatttagtggtgtaaaataatgggtccaccaatttaaatgaaaatcaatggtgagatttgatagtgtcatgtgactgtctaggagtgtttataaaagtaccacatgacggtataagagcgtttatacgaagtttaatgtacttttagtatataataaaatataatagatagataataaaataacgaaaaggagaaaccgctggttcagatgcggctgtcacctacatccagcgtgcatgataatttctttttattaagatgctcatacagtactactggtttcgatttgcaaacaattctctgtgcagatagattgaaccgttatcagccagtggcatagatgcctgaatcacctttctactgctatctgttggccttttccgtgttcttgtcctagcctgttgggaaggtagtgtgtacaagggtgtatttaatttaggcccatttaaagtattgtttcctttttcctgatttctactataatttaaattatttatgtcaagttcagcccatgctagctctatgcaggaataagtctatttaacctccctcatatcttgcccttgatcaaatcatatcctcaattataaaacgggtataacgcctccctcaacttcaaaaaaggtgcaaatcattttcttcggtggtttaggaaaaggtttatgctgggtcagcaaaaaaaactttaaaaaatattagtgggatccatatcccccccttcctcgaactctctccatcctcttttatgtccttcctctctctctccacttctgtctcctccgatgttcttcttcatccccatcctcatctgtctccgccccgtcgctcctgcttctcctcttcctcgcactccttattggcctcgtcttcctcctttacccctccgcgcctgtcgcgtgcatggccgagcttcaccccgacctcttccacgtcaacctttcctcgttcccagttatcgacctcgaggttgcgacggaggaaggtgatgcttccatgtccatccatcctcgttcccagccgtcaacctcaaggttatggctgtggtggccggtgaggaaggcggtctgtagcaatagaggaagacaggagggatgcgagagagctgacaatataatgtgccatccatccctcgtcttcctcccccgatgtgccgtcattgtccgccacttcgatgcacatcacgtcagccctctggggaggctgcgccgtgcatgggggaggaggcgggctctcttgtgccacgcgtgtagggagcggaggagaagctgagtggcatctgagatggaaaaggttgaccagagccctagtacgtgatgccaacgggctacgtgaggagcggctcatccatggacaactttagtgactaaaacccgatgtctcggtgcatccttctcctcctccccccatgccaccggtgactccctcagtcggtgactccattgccggcggaagcagagtactcgcacggtgtaggctgttgtgcccagtgccctccaatacacgtctgccaccttccatccgtacggaggagctcgtagcgcggatctcctggtcgcaccttcggtagccagcgggaagagctcgtggctcggatctacggccaccacgcgttgtccgcaaaggaggaggatgaggcggcagagggcatatagtgcattggagtagtgccactgagcatatccttgcctacactctcacatacacgcggggaagacatggcctccgatgccgtcactaacatgtgaggcccaccacatatgttttgatgtctcactgacatatgggcctcacctatagaaatcgctttctaaatcactttaggagctaatttgcaccggtttttgaagttgagggagacgttatacccggttttgtggttgagggagggataccattcgattgagggcaagagacgagtgaggtaaaatagacttattcgttctatgcatgatccacatgggcccaaacaatatccattgtgcctcatagaaagagtattaggcccattcgccgaagcccattggcagcttaagcaaagcactgtatatccaaacatttgtttcttcttgagtccggtaaggctgtgttcggtgctttcccatccctctccctcgtttttccgtgcgcatgctttttaaactactaaacggtgctttctttgtaaaaaaattctacacgaaagttgcttaaaaaacttaaattaatttatttttgaaaaaaaatagctactccctccgtcccaacatagaagagatttcgggtgaatgggatgtattctagtactatactccctatccagattcatagtactagaatacgtcatatcgaaccaaaatcccttatatttagggataaaaggagtaatacttaattaatcatgcgctaatgaactgctcggttttctgtgcggaggagatggttcccaacccaagttacaaacacagcctagtggtgtttggattcagggacttaactttagtccctatatttagacactaatttagagtattaaacatagactacttataaaactaattatataaatgagagctaattcgcgagacaaaatttttaagcctaattaatccataattagagaatatttactgtagcatcacataggctaatcatagattaattaggctcaatagattcgtctcacgaattagtccaagattatggatgggttttattaatagtctacgtttaatatttataattagtgtctaaacatccgatgtgataaggatttaaaagttttagtcccatctaaacaggtcgtctaatactgagctggattgattggagtttttgcagtttttcacatgcatgcatagtcttaagtatcttacgactgcagatactgaatgtttgaaagaagttctgtcagacctgaagtatctaacaatctcaaatgccactaatttatgaaccgtactgaagaaatagaaaacgaaaaaaaaaaggacatttggttagcgagaggtcattgtcgatgtggagatcaggggtacacgtacgtcatgacgaacgggccaaatcaaacgagcggactacctacgttgtatgcatggatgattgatggagtcaatttgtttttatttcttccgagacagagacagagatagatggagagatatggtgtcaattcgttgtttccaagtcgtcctcacaaatagaaatttccaccacaagcttgaccacagaggctagttatattggtcaattactaactctcattttagggcgtaatatgttttgaaactaaagtttgagtacaatcaatatgttcttaacagctataaaagtagcatttctatccttttttaaaataaaaaaaatcaattatgaaatttgaaatcctgacacattttttttaatatgctatacatttgcaattcgactactgttggtcaaaactcaaaagcatggtccctctaccccaagtctccaactaacctcccctgcacctgcacttggtagaaaaatcagaaaaatggccggttgctagagctgctagctaacctaaaccaaaaccagcctttatctcaactgtttttgtctccttctcttcccacttttgctgcgagctggttgtgcgttttcctttttgaaagaccaagttgtgcgtttcacctgttccgttccagctcaagtacaccgtgtagatggtggctgcatgtggcaaatggcatgattatttggaagcatccgtcgagatgtaggctcgctcatagtgtggcctgttcgtgggccaaatccggcttggcttggttcttccagtactttagcctcgagacattactatagtcggcagtccccaaaaacacatgaaaaacaacacagtaatttttcctgatttctttaaaagcatatatttctgattgattcttttaaagtattttttattaggtaaataattttagaaagatgcaggggcccttcaatttccaggcgtcagcattagtcatgttgggcgggacagggtatggattgaggtttagaagggtatcaaatctgccaaatttacctagataaataattctccggatggatatgtttcatttatcatgtaagaaatggaaggattgaatggtggaacttgacaaaatcagatggatcaaggtttcattacagaaacacaaaaatcagattcagaatcgaggtcgacagtcaaaccgtgtgtgtcgacactcgacatccaataagaaggaagaccgattaacggaaatacactgcagattttgttaattacataacaaatgtataatcctggttttgttctctccaaggaaccaattctgatcctgggttagaacatggttttagattcttgtatgaacataagcaactctttgaccttgatcaagctatagcatgtgacctaatcaatcaagatacctatttgactttcataatatatttttccctatcacttgagcatgcatgcttttgaccatatatatgcaattaattatattttgtttggcacttgttctatcaagacgaatgcatcttatctacatatctgttgccctgtcgcttggttgtttggtgtggctacaatgatcaagtaaatagactttgatgatgcaagcatagtcgtttcaggcttgcagctagcaactggctaatcagcaaatgatgtacatagttgcatactactccctttgtcctaaattatagggcacctctttttaagaaaaattaagctcggtaacttttaactaataagcacactaaccatatatatgctaagtattatacatgttatttcacttatattcatattttaaagtactttcatgtaatattaatttcatatttgttaggaatataacatgaaatatattaatgcttaaagtatgtcattgaagaccgtgtaaaaaaaaatataggccttataatttaggacggatggagtatacagttgtaactcttaagcagatcgtcatcactaacaaaccaacagaatgacaagaatgcgcatagaaacacatgtttcaaacatggcattagagtaaaagtttataaattatgcaactctaagttttccatcaccctaagtatatcactagcatacatcatatttcatcttcactccagcctcagctcaaaagcttttgatcctaggggcattcttgtcttttttttaagaatttctctcattcagcaaattaccagtttttagagtgtcttttagccgtgacatgtttttacagtgtcttttagctgtaacacgtttttacaatatctaccagcaaattacactttttttaagagttctatagcaaattttgccacacaattattagtggaaagtagtagcgtactgtatttttcaaagggatatgaccagtagagcatatgaaattgtaactcatggtagttaatccctcattaaaatctatcagtacctatattaatagaacacttttcaagagatccgacgttaactaaagcatgcaaaattatatttcatggaagttaatgtcttaggagattctacgttaagtagaaagatctgaccgccaatcaagtattatatcatcaagatcatatatacattaattgatttaatctaccataaagaatggtgtgaatgttaaaagaggtgcctcttttgtagcgataactaaattaagtgggttccatctagacatcaattcatacccttgatttcttatataaatagtataaaataggggaactggagtctagaggtgctcctttgcaacttttctttcacccttgcaatgctcacggttggtagatcaacaaatgtgcaaagcgagggatctaatcgtccacttttgcgaaagactcttaacccttttttccttacctttaggtctacatggtaacatgtgtttgtcaggcatcccggatcagatggatgggtcaaaattacgcctccctgaggaactgatgcccacaacttttgacctttgcagtattttcgctagaaagaaatgactgcagaatccaaatggattcgtagatttggagcaatttgcttaatttcccttgttccgaggggcatcgatccagcgatttgtcatttgtccatggttttaaccaaacattttcgttggaacaaaagagcattatcctagtgttaactatagcaagtgaactgtgcaacaacaacgtgatctctatgagacattatttgactgttaattaagtgtgtgttgacttgatagtattcaatgccatatgaacaaccttttactgttaggagtacttagtagtactcctgtgcatcaacatggacaaattgtctctggagaactttcttttttacaacatgggcaatccataaccttgttgagtttaatttatcctaagattaattaaggccttgtctggtttgactagttagattttacatcatctaagtaacacataattcttgatacatccatctatcacttcttgattaaattgaagatatgagagttcttttttttgtcctaaggaaataagtagttatataagtttctattaatgtaagatatctgtataataagtatggatatatgttaaaaaataactctgaaaaataactatgtcttttcaatatctcctaagaccataaaaatattcagcatatatacaaagtccttaatggataaggggcatagtactcttttaagaaaatgcgcatgctaatctggtaatattagttactcctacttgggagttgaattcttaaaagaaaactaggtaaaataaacgcaagtgacatgaattagaagcaatttcaccgatcaccacccggttattacctcgatgtttacgtttagtataattaatcaactgcggtgataatcaattcataaactccgaacaggccacatgagtcaagtaattgctgagaatattcctctctcttttgctagataatttcctttcccaatcatgttgcccctgtatgaaggagccaaacacatgcaacaaagagggagagtgtggctttcttattcacctcctttttctgacctttttagttgttcctggtcgtcgtcttctctctttctaaaacatcctcttttctcatgtttctctccataagaaaaagccattccttctcttgtggcataaccaaggattaaaatctccggatatgccctttagctgctaggctttccatcagctacgaccagctatagctggctatagcggcagctaagcccattagctgttttgcaaaaactaacataaattttgcaattctcatacagttcaaagagtcaaagacacttgatattatattcaatagttccataccacattcaatatccgagaatcatataaaaatcttgcacatctcttgttaggaaaactagagaagaatggggagagatttgtgcagcccagcagtccccgccgtcttcagcacaaccgtcacgttcgcagcttggggaagaatggagaagtatggggagggagggattggtgcagctgccgcccaacacagtcgccgcttggtgccgggattgcacagccccgcctccgggcgtcgccgctgcggcctccacgtggagctgcagtcgttgttgctgcaggtcagagtcgccgtcgccgctgcaggttgcaggcttgcagccgccaccgttgcctccgggcgcagccgccacaaagctgccgtgcctttttttcgaggggggagggtgagagacagagtgattgagagagagagagatagagttagggttgaactgctgctatatggacctatatgggctgttgtttagctttaggccttcagcccaccaagttagttgccgctatctaagggcccatttagcggctatagccagttaagagcagctaatagcgccatagaatgtgtagcggcaaattggacatatcttagcggttgcttctcctagcagctaatagccggagatttaaatccatgggcataataacatcttggcctctttgttgtatcctatgtgaagttttattactttgtcctggaagaataaaaatggctggcgacgactatgatttgttttggaggagactggtgttgtattgtagtcaaatatttacagaacaccagatatttggcaccactgatcccctccataccaggggtaacaaataggccaaccaaatctcatattgtaacaaaaacattagacggcgttagagaaaatggcatgataaaaaaaactgtgcacatcacttgcaacagttcatgttacattgtagaacatttagttgcaagtagaaaaggtatacatgagaggctagataggggagaagtcctatttataatcctaaattcttgcagaaagaaactcagcatcaatctagaattacaaaaccaaacatttacaaccctaaactctctatccggctcactttgtccccttagagcaaattcatgttacagccctcttatccagttcaaaaccttataatataactgtagtaatttatagtgtgtttttctactctttctttacagaagatatggtgccataaatagagttaaacacaaaagttattgtttggttgatttaaacacaaaagttatttgtggaattaccaaaccaccggagaacaacggacgttcgcccaaattattaagaaatatggataacgaaggatacaatagcaacaccaaggcgatatgaacaaggtttacaacatctatgattatcacgatatctgggtgggttttatcgttgaggtgtggtaaaggtaacagactgctataatgaccaagttcaaaagaatttaaataaaaaataatttttttgtagaatttatccatttttcttattttcgcttgtaactaggcttattgcagagaggggaaacctctctctgatctataaggttaaacctagctgtggtgcggttaatatatagtggacgcctcgtaaagatagcataaaacctgctccaaaatgcttaaatgcaggggtatgtaagcataattgtctttaagccttgtgttagttattccatttgagggcgggattggaggggatcgaggagggttaattctacaccttaatagatgtggaactattcccgccaaaaccccctctatttctttgtgggtggaattaaccaaaacaaggtcttaatgtttggtgtggattgattaacttatatatatcttcctgctttaagaactactccctccatcacaaaatataatgtgtaactatcattaacatgaagatcaagaaagaattattatcacctcatttaaaccactcgaataaatacaatacttgcacccaataaaattaaagatattgagagtgtagtatttaaaaataaataaataaaagaggacaagggtgttatttaactttatatatataatgcatggatgcctttgtattatgaaatattggaaaaaatagttatactttatattttgggatagagggcatatttgcgctagtagtagtttgtcttgtaatccctcaatatattttccagatcccaacagtgctatatccctgagccatgtgttctcacttgtacggtcaaatagctaaatatatttaattcagtggttaaaaatgaaggattatattccctgtcacagagagtcggccggtatggataagcgtgtctcatacttctatgatatttcggcaggtatatatggagtaagatttttaaaatcactgcaggatagatgttgaaaaaaaaacccattaatatcaaaggcaataaccaataagcgtatctgcacctacgtacatacgtgtgtacaggctggagatactgaatgtacagcgcgcacagagtgtgcacatgttgtcgacgggaggatactgatggctacacgctaatacaactctgagtgattaattagtctggatagcttagctataatgagcctctctagctcgaacactcttgaagcaggagtacattatgtatatatgtatgtatgtgtatgattaatggctagcaaaatactccactacgtgcaagttgctcacctgacctagctactagctaattggctggctaatgcgtgtacgtacatgctaatattgctaataccagccatggaacatgttgcgttgaattaatgggtttatttggtggtagctagtcagcctcgcacaaagtagtggaccagccgtcgctcgcgtacgagaagagcaggcgagacagtgcgtacgcagctgctactactaaacacggatgcaattaaggcttgatttgtggcctcgtctccgtgctaattaatcgcgcgccagcccgtgtgcagcccactgttgttggcagacgtcctcactgggtgcgcatcatctgccgttctctatttctacggcaccgtgccgttgatcaatcccaaccgttactttgaatggatgatcaggatgtgcgaacccactggctgaaggatcgatgcttaatttcctcttttcttctttagttcttctgacctgtcccgattgaataaaaggaaagagcgacatcaccgttaaatgtttccatcattgagtaaacagaaacaaaatggtcaggtgacacacgtaaaagtgaaaaaatattggtttcaaaaaaatgaaaaaaaaagatttttctgttagcttgtcgcctcatgccacaaagctaaaattttgataggtaaatttgtcatcaatcgatgccaaggtggaagttacagaacaataaattcaatgtaaaataggagtgttcttcacttctcgtgggttattttgatcttatccgtccatttcaaaccaacggttgggattggccaacggcacgctgccgttgaaacagctaacggcagacgatgtgcacccgtcctcattggtcaccagccgctatagacttgccgtagtagctctacagcagcataaagagatggattattttctttctccagaacaaatataataataataatatctttataactgatgccatttttgaagaaaaatgcataaggatattccagctaactccacaaggtggtggattaaacgatctggtttcgaaaccttgtcgttactaattatttgatattatatcattccctattattcgtgttcttttttcatttctgaaatttactttttctaatttatataagtgtgatattgaaattggcattcaatagttaaattcataaatataaaatttcccgaccatttccgtacaaataatagaaaaataataccgattctgaccatttccgaccataattcgataataaattttagaattgatttagaactttttttttcatccctctgtatattttctagccttaatttgttggatcatttccgattattttatttattttccttccatataagccttatctcaaccaaccaataaggaacatctttttccgaagatcttccacccccgaacacgtaaaaaaaaacaatcggatctcaaattaccatacaaatgtacaaaatgagataaacatgcagtcattaactaccataaaaggtgttcaaggagataacaacccattgattacaacgaaacccccacgcaggcgtaggtaaggaaagaccaggacggacggccaagccagcaaataccaccaccacatcgtgtgaaagccgccgcagcaacgagcgagggggatgaaacccaaagacggggcgaagacgggagacggaacccgcaaagacgcgtattagttgggcggctgccgcgactccaccacctctcctcgctttgcttgcttgcttcctcctcgctctccctccctctcttcgcttccttcccctccaaaaacccaataaaaaacgcctttcctccccccccccccacctcctcctcctcgatcccctcgccgcgaagatccgatcccgagcacgagcagcacaccgatcggtgggtggcctcctccggcagcctgaggggtggcgggaatggcggcggcggcggcgatggccctctgacgcgacgcgcgcctttctctggcttttggctgtggtgggtgcttgtgggtggagagagagagggagagggagagagagatgggctgcttctcgtgcttcgactcgcccgcggaggagcagctgaaccccaaggtgggagggccgtacggcggcggctcctcctcctccgccgccgcggccgcgtacggcggcggcggcggttccagcgctggtcggcatggggagaggggcggtggttacccggacctgcaccaccaccaccagcagcagcagctgcccatggcagcgccgcgcgtcgagaagctctccgcaggtgcgtccgttactccctccgttcgcgttgggttgagttggggtggatctccgggcggcggcggcggttggtggggatcggatccgcgtcggggggacacggattcggtccttccttttccacgcctcctttgatctgattttagtattccttctcgtgtttcgtgatctctgcctaccgaattaccgcaatttgtcctgcaaaatttgtccagaaagcataactatcttgcgctgtttgatatgtagatgctgttggggttagttcatctacttcagatcattctgaaatgaaaaaaaaatatggtattatatgggagatgaattgatagaccgataggacaaggcctatgctacattcagactgtttatttggactctgtagttgtaaattctcgctgtcgcgtgaacatactggttagcttagtttttttttctcatgttttggtcaacatgggcaggggctgagaagacgagggtgaagagcaatgcaatactaagggaaccttctgcgcccaaggatgccaatgggaatgtaatatcagcacagactttcaccttccgagaactcgcgaccgccaccaggaatttcaggccagagtgcttcctgggcgaaggaggctttgggcgcgtttataagggccgcctcgagagcactggccaggtaacttattttggcaaatgggtatatgcttcattcttgcattcgcctgtggagagctgaacaaccggaaaattgcactgttgtaaaatctttactgttcacttttgtttgtctaagatctacgttctgaactgtttacaggaatgagaaatgaccatgttgagcaactgtttatttcatcttgtttgtttatgcattataatactatgctgctccctctggtcgtaatacatgtcattttggcctgggccgccttttttctttttaaatatatttgtcaaacccattaaattataggactatgcaagtacgttgaaatgcaaatcttctcatatgattttctttatccagtttaattattcagaaatattactatacccagaagttttgaaactttgacatgatgcttgtccaaaatacaagtatttctgaccggaggaagtagtaataactagtaagtgcaattttaggcaacaaggatctagtgttgtatgttcagtgtgttgtattgaaaaattaagagcaatatgattgaagcaccaaaacttcttctaaattaaaattagtttaaaagaagtatgatgattgaagtccctttttcgtcattgcaggttgtggctataaagcagcttaatagagatgggcttcaaggaaacagagaatttctagtggaagttctaatgctcagtttgttacatcatcaaaatcttgttaatctgattggctattgtgctgacggagatcaacgtcttcttgtttatgaatacatgcactttggatcattggaagatcatttgcatggtacgaattctatgtttattccctgtagagatactgttttgcatatgaccacaacctgtaaattttctgttaatggtttctatgtctgtacctgcaatactgtcctctgtcacatgtttccttaggtacagattgtccatcagcgattctatccatgcttttctatctgtgctctttatgtggcagaattagtgtccatgattattgtttttcaatatcggcaaatgtttatgtggtggtagactagtatttcattacttagccctaaaaatgtcaccatttgcattaacctgctccctgttgaagtgttgacattttgtctcttccaagggtctaaaataggcttgtaagagtggcaaatagttaatttttccctaaaatggtgcatgacagcataatgtgagtactatgtttgtcatgttttacagttcgctcgcatttctcatctgtgtgtactgtaattttcagctgcaatttttagatgtgtttggctatttgttgtaagttaaataaaagtcataaaacctatggagttacttataaagttatgtggagttgttggtctgcatataccaaaaaattacttataaagttatgtggtctactgaaaatggttcgtgatgtaaaaaccaatgaaatatttttagtcaatgatctatggaaggtgtaaatatattttttatgtcttgttacttctcaaggttctcttatgttcagaaattgtaccctttaactgtattgtgtgagtctaatatgtgattttgaattaagtgtcgatataaatatgtatgaataatgaccgtactaaacttcaataaattgtttatgtggtatagatctacctcctgataaggaagcattggattggaacacaaggatgaaaattgcggctggtgctgctaagggactagagtaccttcatgacaaagcaaatccaccagttatttatagagacttcaagtcatcaaacattctcttagatgagagtttccatccaaagctgtctgactttggtcttgcaaagttgggtcctgttggtgacaaatctcatgtctctactcgtgtgatgggaacatatggatattgtgctcctgagtatgctatgacaggacagttgacagttaagtctgatgtatatagctttggagttgtgttgcttgagttgattactggtcgtcgggcgatcgacagcactaggccacatggggagcaaaatcttgtctcatgggtaagctatgttctgattatttaggagcacatgctatctatatatgctaataacctgaaatgatttatctgtctagtatctcctaagtaattgtttggatcctgacatgtcgcataccatcaatatgtttggtagtagatctaactaatatctgctgcattttatcagaattaaaacatcttgaaaaatagctcataaagataagatatttcctggttactttctggaactgaaaatacaaaagcaaatagagtaaattattatgtcttgatgtccaccttccaaggaacggatgacatattagatgttgtaagctacatctatgatttcctgtcctccatgcttatactggtcaacatactttgatgggctagagcagatcatgtattgtgaggctaaatgtttttttttttttgggggggtgagaagaggctaatgacttgacccatgtactcacaatatttcatattaactgccaggcacgacctcttttcaacgacagaagaaagctcccaaaaatggctgacccaagactggagggacgataccccatgcgtggactttaccaagcacttgcagtggcatctatgtgcattcagtcggaggctgcgtcgcgtccacttattgcagatgttgtgactgctctttcctacctggcatctcaatcatatgaccctaatgcggctcatgcttcaagaaagccaggtggcgatcagcgaagcaaggttggcgagaacggcagggtagtctccaggaacgacgaagccagcagctctggccacaagtcaccaaacaaggacagggaggattccccgaaagagcccccaggtatcctgaacaaggatttcgacagggagcggatggtggcggaggcaaagatgtggggcgacagggaacggatggtggctgaggcaaagatgtggggtgatagggagcggatggtagccgaggcaaagatgtggggcgagaattggcgggataagagacgtgcgatcgagaacgggcaggggagtctggattccccaactgaaaatggctaggagcagggcagcgaggggttgatccatccacccatgtatgtctgtttatttccaacactatttgctttcctgtggcagggagaggggagggagggacggtgggttagatgtacatttctagagaaaaagagagaagaaacgggagctttgaactggatagtgaattcatgttgttgtacttgtaaattctcagaaatttttgtgagaatgaaaggacacttttgagttccctttgaatcatcctcgttatatcttcttatcatgttatgcgctcgtagcaattaataatgtttatatcggactcgttcctattagttgacttgatcctggtcatggacatgggatcattcttcgtcagcgatcagttaatgccggtgctgtgccgactggttacacgatcgagatgctgaagatgctctgaaagcaactctgtctattggtcgatccatcagcgggagagaagaggcaagacgtcaaaaaaatatcaagcagacgttttggtgtcacgcaccgagcacacggcaagcgtgcctggaaactgaccgatcggtggagcgggggaaccgcttgcgcgcacgacgcatgcatctcccggagaacattacaccaccgtcgccgcgcccgtgtcccctgccggccagggagaccccaaatataggctcaactcgctccctgtcacttgccatgtaggaaggcatagataggaagctgtagttacacgcgtacgccctgaatctcaccaggagaaagcaaagcgtgtgtggctggcttttcctgcggttgtgtttggctcaaatcgatctcgatgatcttgtttttgccctagccgtgctggtgtacccggctgcttaggacatcatcacgacgcaacacgcaaagcctaaacggacggagactttagacgagaaggcgacgctaccgtaggcatgaaccaccacggtccaaaagggtatgggtgcatacacaaaaatagacatacgcccacagtgaagggccgccatccaacatgcacttcagactcattagtaggcccaaaccagcacattttccttactactttgctgacctcaggccgaattctccagtgtcggttcaacccaatgataaacggaataagttcacttcaggtaccttaatttgtcatcgagtctgaaaatcatctctaaaccacaagaccggatatgacgcgtctctcaactttcaaaattagtgcaaataaggtccaagttggtttggacgacaatttcgattgacatggtgcttatacgtggctagtttgacttagttctcatcctatgtgacgatgaggtggcattggaagcaaaatagtcccaccctcctcttcatctccacagacagcggcgcctccttctccgctctcctcttatcgctatgggtccaaacactactagaaaattaatttttaggaggccaaaaaagattttagtaggcgggcgctccgtccatcagtatgcaaagacctgattttcacagacggacgtccagtccacctgggaagctgtatcttcgcaggtagaccgcataactaatccgcctagaaagatatatctcccaagcaggctgcagcacaatatgccatctgggaaaatgtgttacgcccgcttgagaaaatatgtagtatatttgaaattaattaattaatacataaatatatctaacaactagtatatacatgtaatacagatataatacacatatattgcattcattagtaaaaagtgttggtcatattagtaaaaagtgttggtcatatatacatgttaattacacaagcacgtcatttcgaaatatattgttaattacacaagcacgtggctccaatccaaaagagacttgtagtctcgctcatcgctaggctatcttcggggtcgaagaaaagtccatcttgataacagcactcgcagtggatgaaacacaggataatgtgggccccacacgattgtaggaggatgtgacgggccactagttaaactttcctatcattagccatcttcggtttcgaaggcttcgggtcataactgcccacgaccctaatgtttatctggtctccgataattgcgctgttgtggtggagagggcgaagctgccaaagcatccaaagggtttccaaggcataacctctccccgtgaaacttcaacctatactccatctcatttgaaatgctgatgcccaactcctctccttcaattaatcgccgccgccattcttctttcattcttgtccgtgatgccataggccaactgtcgtgtggtgccactcgaaaggtgagctcttccaccctcgcgcctacgcgacgatccagagctagagaagggagaacttctgataccagcctcccattggtggaggccaaacatcacggtgagacgggggtcgctgaagcccaaggaaaacgagtcgtcggaggtagtgtactgcattgactacgcagtggtcaggttagtactctcttcttatagttcttcacgcatgatagtgttggccattttcgcccatgtgtgcgagatgttcgtcgatggagttgttctgcaggtcgttcttcatcccacaacacctaatgaaatattggggctctaacaacccgaagcaagtggtgtggacttcatccccatagtgctgaagaagtgggagtaagccattagcatatgaataattgtgtattaattaatacaaactttaaaaattggttcatttgatttttaaagaaaacttttacataaataagaattttttaaaaaaaattcgtaccatttgatggtctgaaaatatgttaacaaaaaaaacgagtaaattgtttggagttgaagaaaacaactatgccatagtctatgatgcagcgggtgttggagggactctagttgtgtgatctcacccctaacgacatacaggaacggattaaagatcgaggttgagaggcttgctttgacacgtttggtatggcagacatcgtccggagggttgtataggtagtcccatacgtaaaatttagcgatctcgtgcgctgagatttttccgaactgcaaaagaaaaagaaaaacggaggaaagggcttcgtacgtcggcgtccggcattggcacgccatgtgtgcggggtgccgcgcgctctagcacccattcagacgcctctcccgttccctgcagggaaagaatgacaggatataataatattgcggagtcctccccctcctcccgcgttgcaggataaacatgcaagcggcgcacgcgccgcggttgattctcgcggagcgcgtgcatgatcagtccgtgtcatcaccgactcaccgcgcgcgctgcgacgacgcgacgctgtgtcttcctccgcttctgcacacggcgcgcggagggctgcttgctattgccgtctacggagtagctgagccggtaaaaaggggagctgccagccttttgccagatttcgctttgcacgggtcacagtctcacacacacacacacacacacgtcgtgtcgtctaccgcggcctgcaggcgagggcgctcgacgtggcgccccgtctcgcccttcgtacgtatcccggtctgcaatagctggggacgcgccggtcacatgcgaccatactatgcacgcatgcagtgcagctgcacaccaccacctggcgcgtctcgtctgctgcgccgctcggttcggttgaaaccgatcgatcgagcacggtagctgagctagctacagacaccggttcagttcctttcgatctcagacacgttcaatagcccgcagaggacaacaccgtctctgtgtgtgaatgtgtctgtgcatgcaaggcgcgcccacgaggagcggagagcgcgtgttgtacgtgcagccaaggcccaaaagcgaggaggggatcgcggtcgctacctcctgcttccgcggggacacccttgtccgcttctgcacgcctgcatatgccgctgccgccttatttgatcgacctccacacacttgtcccgctacccttcgcgtgcgtgcacccaccgccccgcttcgcgccaacgctttcgattcctctctctctctctctctctctctctcgctcgccattttgctatacagctcgttgatgtgaatgtaaacggtgtcgcacggtaagctgagagactggaaaatcatgttgcagtaaaatccaaattttattattgaactgcatgaatcgaatgaagctaagcaagagcatcgacgcgacaggccggtcgattgcacacccacacccttcactcccccctcagtagctaggttcacaaaacacgcatgcactcggtcggtcgggccagcttaattagcttgcttgctcggtcggtctctgcatgcaagctggacgaaccaggcgagtcacgcgccaatacagtccctactagatctggccggagtactactgtacgtactacgccaagaggtgtctcacctagtagctagtacgtacgcgatgaacatgtgttcgtgtttatgtttgtgtaccaccagctagctggctatacctcacatgagagaattactactagttctctaagcttaatcagactacacttccacaacaatggccatgtcaggcttgatgatctgctccgttctgaccatagcgtgatcgccgtcaccggccatctcgtccgtacggttcgtctcctcgtcatccaccttcacctccaccacctccgagggcatcacgtcgtcgatggggtgcacctccgcgccgcagctgatcctgccctccggcgctgccgcgacggcgcccttggcgacggcctgcacctccttgacatgctccggcagcttgatctccagcccggccgccaccacggcggacgacgacgacgccaccagtggcttcttgctccggtacgccatgtacagcgccatctgcgccacgccgaacacgaagcccagcacgttgggcagcgccacgaacacgtccttcttgagcagcccgtacaagaaccagatcaccgcgctaagcaccaggaagaaggatagcgagaatggcatgaactccacgctcttggtccggatcaccagcctctgcaaaacacaacaatcatcagaaccttgtcatcagctgctggttgatcgatcgagcgattagttagcaagacatcaagattgcattcgtttgctagcttacgatgatgctcaagggagcggcgaagacgctgagcgagacggcgacgcagatccagccgaggacgtggacgcggagctcgccgcgggagagcagcagcgtgacgagcgcgatgacgccgaagaggccgatgttgaggccgagcagcatcttcgccgtgagcatcctggcgctcttgggggcgtaggcgaggtacatggcgaggtagacggtctcgatgacgcaccccacaccattgatggtgaccagcagctcggcgccggacttgacgaacgcgtagtacatccacagcatgcagctgaagagcgtcaccacgtacggcgtcgactggaacccctccgtcgacttcttccggtacacccggtagaacgtcggcctgcacgccaaacgcacgcatgcacacacggttaagttattgttcaacctgctaataattagttatcaacaaactagctaacagcagtttctttcgtctgattaatggaagttaaactcatgcttgatctgtgtcgtctcaataatggaactacaactgcctacaaggacacacacaattactctgctaaaagtgacgtgctgagagattttttttttctttccaccttcagctgactattgtgagaattcattagtagaaatcttcagagttatgttgccttcaggtgtatgctgaattctagaatggtatagatgatggtgacccttcatgtgtatcattgacatgtgtgatgcttttttttttgtacatactgaactagtattattattttaaaaacctaacaaaacaatgttatgcatgtgcttgatagaaattgaagcaagttgaggtgcttacagtggcgaaaggaataccattagtgagattaagttacctgcaaaaaagatcaaaggcagacacgggttatcagtgatgtcagccaatacaaaagagagagagagagagagagagagagaggcaaacagagaaaagaaatgcatggtgcatggtaaaaactaaaaagagaaaaaaataaggtgtgtacgtttctaactaacatgcgtgatggctccctttctctgtttagagtaactacctgattagagcctaaaagttttgtttagcagttccatttattcaggacagaaacactagttcttttttttttgttcaaacactagctttgaaagatattgaggaagacacactggagtactaattaaggtgacagaagcaacaaaggagattattgatctagttaactaagaaaacttgattccaatgggtgttttgctgcggttttcagggacattgcttgtgcggttgtgggaattaagatcgatacatgctgccataatgtgtctccaacaatatgggagaacatgcatgcacggattaatcaaatcaaaggaacagagtaagctaatataacagctagaaagaccaccgtatgcatgagatgaatgcagcattcatgagcatgttgatgcctgtatgtacctaagatgccaaaggtgaaggcccaagtgctgcgttccatggacatgaaggccatatcgatctccctagaactcttcctccaacaaaaaaatctgaacaaaaaaacttgatactagtatagatggtagctagctagctagctgagcctcccttctcctcttgctcaatggagagatgcaaaacacactgagcagtcagtggagaaaggaggaggagctatgtaattaagctaagatgtggcttgggttcatggagagccttgaaggcaggctcctatatatagggagagagaggtgagaggaggaggagagatgctggagaaaggaagaggtgtggcaacagccagcagaagcatgtgggccccccacgggtcgatcattgcacactgacctgacctgtcgcgcgatgcgcttgtggcgggtacgtgtagcatacgtaccctgctggaacgggaaaacctcaccagacaccagccatggcaatatgttgtgcatgtacagtatgtagtaacgtactcctaatgtatcgaggggcaataggtttttttcaggtatgtgcgtacacactatgcccgaagagagtaagccgtgtttaatggcggcaacgccctgtgacatgtcaaacaccaaacctggagaggcttccgtgttaagccccccacagtatccctggccgtttccacctctactttcgagaggctctgtgtgcagtgcgattcgcggtgggtgatgcacccagctgtttgacatgcagagctctcccccgatgtcaccgggtgcctacttgtcctgccttttttttgttgctgcaacggccgggctctcgcaccacgatagatttctgcgaaagatacggcagcacggagagggacgcgtcgcgtgcgctgcaacctgcattgtgtgctcgtcacggttgacacagctgacagcccaacattttttgtacgtagcgcgcccgcgctgtcattcgagactcaccgcgaccgtccgtccttccgaaaaatctttccaccagctcgcgcgcgcggctcgtcccggccggccgacgcggtcacgtgacgcgtacgtagctactatagcttactagatcggtgtggcttgcttggttgattgctttcgttgcgcggcgcgggcaccgtgtgtgtgcgtacgacgtcggttcgatcggggccggacggagccaggctttcgggagttcggcggccaagggcgtgccgaaccgagcgaaaaaaaggcccaggcgctctttctgtgctacagatccgtcccgcgcccggatggttaactcaacgctagggctacctctccaactgatcccagaagcttctcgactctaggtttcctacctagcttcaaatgctcatcaatctcgatcggtggatcaatcttggcttgctttgcgtaactcgttttgcgtgttgtgcataagtggcaagattgaacgttaacgaggaaaagcctcggcctttttttctcgaaatgaactgcgatcttgcgagccaggctagcatcgcgcgacggttcgacgcttttgaggtaaaaccgcggcgcaagtcaaccaaatcattggtagagggctccacaaatgagaccacgtcgacgtcgatcgatcgatcggactgacgagcaagcaagcaaagcagagcagcaatctctgcatccggccccgtttccgcggacggtttccaaactgaactcctccatctctctgcatgcgcccgtcgttgcgagccagctcgatctgcgtggattgccttcctcgtcatcgcgcacgcagaccattaacgttgcaggtgtctggttggcagctctctcaacgcgaccgatcgagcccgcccggtcgaattcgggttctcgcctgcctgcctgcctgcctgcctgcgtgcgtggatgtgtgtcgtggcgtggcgcgcgggcggaccgtttcccaatcatggagaaaccaattatggacttatggttcggaggcggacgcgcgcgcgcggtgacgtgacgtgaaggcgcgcgcgggcgcgagcggggggagtggatcgctcgtcgctcgcgcgcgctggggcgcgtggatggctggaatgcgggatctcgcccgcgagacggcgtgcgtgaagtgtgagacgcagattagctttggcttggcaagaccggtatcattgcgccacagctgaatgattgtggcgctaattaatgacaccctcctcgtcatcagccgcgccgtagtagtactactactctactacagtgtaagcaaggaacgcatgatttgcaagcgattgggttttggctatgattagcgtcctcgaacttagggcacccacaataattatctataggctctacaagagatatatatcagcatattttcctacttggaagaaattaaatgaagagagagagcaaagctatctactaaccttgagatactctatagagaaaaacgaggcaattgattagagagctatagatacccatgtagacataccattaaagtagtttactattaatctagtctattgctaagatgtacatcttttatagatagcaccttactttatcattgtgggtactcttactagagttatgtagaagccacgtacatcaatcgtcgtttgtactgtatagtataactagcatggtggcccgtgcagattacgcggctagcatcgttatattttctcttatataatagtatatatgttttcttattttattatttaaatatattaaaatgacaacataattttaaattttacaataactttacaaaactactaatgtgtaatatttatattttattttatatacgtgttagttattaattatttttaatatcaaattttagttatttgtaaattatatatattcctatatggactctagactcgtcttttaatattttttttctttaattccgaattttctgtaaattgtatttctatatagactctatgctcttctttcaatattatttattattatttctaaatttttattatttctaattgtatttctatgtggactctaaactcatatttcaatattctttaatttttaatttcgaatttcagttacttctaaattgtattcctatattgactttaaactcttcttcccatgtttttcttaatttcgaattttagttatttgtaaattgtttttttatacggactctaatctctacttttaattttattatgtttattccaaattttagttagttttaaattcctatatggactctatacttcacttctaatattccttatttttaattccgaatttctattatttcctaattgtatttctatatggactatatactctatttctaatatttcttgtttttaattccgaatttcagttatttcctaattgtatttctatatggctctatactctacttctaatattccttatttttaattccgaatttcagttatttcctaattgtatttctatatggactctgtactctacttctagtattccttatttttaattctgaatttcagttatttcttaattgtatttctatatggactctatactctacttctaatattccttatttttaattccgaattttagttatttcctaattgtatttctatatggaatttcagttatttcctaattgtatttctatatggctctatactctacttctaatattccttatttttaattccgaatttcagttatttcctaattgtatttctatatggctctatactctacttctaatattccttatttttaattccgaatttcagttatttcctaattgtatttctatatggactctgtactctacttctagtattccttatttttaattctgaatttcagttatttcttaattgtatttctatatggactctatactctacttctaatattccttatttttaattccgaattttagttatttcctaattgtatttctatatggaatttcagttatttcctaattgtatttctatatggactctagtctcctcttctaatattccttattttttaattccgaatttgaactatttctaaattgtatttctatatggactctagtctcctattctaatattccttattttttaattccgaatttcagctatttctaaattgtatttctatatggactctgctttttctttttctccgattaatgtgagaatttctaggccataaaagtgaacgtggaggctcctttttctatttatttaataatataatagattataagtatattctcccgtcttaattactgctaccatcactgactcgttcgagggggaaatatctccgcagtcttctcgatcgggttcgattgcaaaggtattttacattatgattacacgctttatgacggttttaaggcacgttttgcattgcggaggcatgagtattttgcgaaacggtccaggtcgtcccacatgacagcgtatctctctctaattgaaagcagcgatccagagaaaggaaagacacagaccggtacagtcattacaatactctacttccctccgtttcagaatacaagacgttttgactttgatcaaaattaagctgttttaagtttaactaaatttatagataaatatatagtactatatataatactaaattagtttagtcgaatcaataattaaatatattttcataataaatttatcttgggttgaaaatgttattaatttattctttaatttttaatttcgaatttcagttacttctaaattgtattcctatattgactttaaactcttcttcccatgtttttcttaatttcgaattttagttatttgtaaattgtttttttatacggactctaatctctacttttaattttattatgtttattccaaattttagttagttttaaattcctatatggactctatacttcacttctaatattccttatttttaattccgaatttctattatttcctaattgtatttctatatggactatatactctacttctaatattccttatttttaattccgaatttcagttatttcctaattgtatttctatatggctctatactctacttctaatattccttatttttaattccgaatttcagttatttcctaattgtatttctatatggactctgtactctacttctagtattccttatttttaattctgaatttcagttatttcttaattgtatttctatatggactctatactctacttctaatattccttatttttaattccgaattttagttatttcctaattgtatttctatatggaatttcagttatttcctaattgtatttctatatggactctagtctcctcttctaatattccttattttttaattccgaatttgaactatttctaaattgtatttctatatggactctagtctcctattctaatattccttattttttaattccgaatttcagctatttctaaattgtatttctatatggactctgctttttctttttctccgattaatgtgagaatttctaggccataaaagtgaacgtggaggctcctttttctatttatttaataatataatagattataagtatattctcccgtcttaattactgctaccatcactgactcgttcgagggggaaatatctccgcagtcttctcgatcgggttcgattgcaaaggtattttacattatgattacacgctttatgacggttttaaggcacgttttgcattgcggaggcatgagtattttgcgaaacggtccaggtcgtcccacatgacagcgtatctctctctaattgaaagcagcgatccagagaaaggaaagacacagaccggtacagtcattacaatactctacttccctccgtttcagaatacaagacgttttgactttgatcaaaattaagctgttttaagtttaactaaatttatagataaatatatagtactatatataatactaaattagtttagtcgaatcaataattaaatatattttcataataaatttatcttgggttgaaaatgttattaattttttctacaaacttaatcaaacttaaaacagtcaaaacgtcttataacatgaaacgaagggagtagtggtttttttaacttacacaatacaacacagacactcacaatacacgcacactcacccctataaacacacacgcaaacatacccctataagcatgttcgaagattcaaccggagatcatgtcgatcgagtgcatgggctgctcgtctacttgctactgctactagctacctgaccgtgtgccatcacgtcagagctagccatcaaaccatgactccatgagtcacgagaaggacgtatatgcgcgccgggctccatgtctcaactctcaagggaacgaacggcttcaagccctctctctctctccgtccggccgtcgcgggtgccgttgcaaaaggagaagcggccagcgaggggagacacgactctacgtggacgcggccggtcgctctctctctccccccttcgcccatccggcctcccaccggtcgatcgatccatccatccatcggccggggcgagacgtaccactgtacacttggatcgcgcggtctgactttgctgcaaaaaaagcgcaaaagctgcacgtcgccttgctgctgcccgcaccgcctcgctgcatccaacacacacctgtctctctctctagctctcgctctcgctctcccatgtgaacctctgcacgacgcgagtcagatttctgtttcattgtcttgtctgcttcgcatctctcatgtgaaaagcagcggccacaaaatttcatcccaaaatgttgttttcgtcatgcgtcagcgagatattcctttttttcctgaaccgtatatactgcgataatatttttagtgttataatcggacaatatatatcacttaaaaaccttatatttagaacagaactaaaaacctagcacatgctaaacgacctagaataataagtattctgagatggaggtagtaagtaggagctaaaataattttaaaaatatgttaatatgattcttttataaaactttcgtgtagaactttttataaaaaaaaaacatagtttagcggttcaagatgtatgtacgtgaaaacgagggaaaaaagttagaaaaaaaggtataaaagaactcattctaagtacaactatataggtattttgttgagacagatgatgggataagatgatagatgggaaagtagatgtttttcgtgatgacttgggcatggtttttaaagaaatctaagtgccccttctattaatgttggatgcttgtataaattgattagtgttgtaattattgatttcttattgttgtttgtaagtgacgtggagttcagcgaaaaccacaatgatatgaactggtgcctggtggtatatcagtatatgcatgtaattcagctcaaggctgagtttgatacagtggttaggtttggctatttagtggaaagtatataattaattacatactaataattaactactacaaactttaaaaaatgaatttatttgctttttaaagaaacccttgcattgaaagtttttcatgaaacacatagcttattagtagtgtagaattagttgggcgttcaacccaacttcactttagaacacacctttggtttatggtgtttgtgtttcagtcttttcaagtagcccaatttagagcgatctctttttcctttttttagcctctcttccttctacattggttttacatgggagtcgtcaggtgtgtgagttccgtactagtggtatgataattgtattagtagtatcatgggttaacaatttgttggttttgtttcggaaataggccagctcaactgtggcagtggtcaccggtttagtttcatgacgatgacagcatgttcggtggttgcgatgccactagggttttgtatctatagaagatatgcatgcgtgtgcctcgccaggcgaagtgcatgttagctagtactaaagcatggagaagacgtcacagaagactagtattaaggcccatggtagctctaactcatatactcccccgttaaaaagtaattatcaattattccctttgagttgcaaacttttgatcaacaatattctttttaactaatataattatttagcatagcatcccagcttgttttagctgcaacttataagccatatcgaattactccctccgtttcacaatgtaagtctttctagcattatccacatacatatagatattataatgaatctagatatatacatatgtctagattcattaacatctaaataaatatggacaatgttacgaagtcttatgagttttagaactaacttcgtgttttttttctgttggttttgctagcatcacatgaatcaatgcctttatttttttttcagtattgacttttgaaccactcggtcccatttgactcaggtcattattagcagggtaattagaaaattgattaatttattataatatgttgccaagttgaaaaggtggattttaaaaagtattcaagaatttttttttaaaaaaagaaaggttaaaacgtaccatatttggtagtttgagaagtatgccgatgataatcgagtacctagctagttgcactttagaacaaggcataccagtagaaatatagaatcttaacataatttttttttgttcttttgattcccatggcttaagccatggttgtgaaaatgtctctaaacaggtgcaaagttgtagttagctagatttgtgatcaaaagtaatttagtactccatccattttatattataagttactttatatttatcctaagtcaagcatcttcaactctaaccaagtttataaaaaatatagcaatatttttaacataaaataaatatactataaaaacatatggatttgatgataatttgttgtcatacatgttgctattttttctctaaaactactagtatgaaataggtggagtacttcttacattggaacttatggaacactttgttgtgcttaaataatactaactatcaaagttcatctattcttggtcaaaacctatgtaaaaatggaattaatttgtaagctggataaaagtattttagtctaaaatgtgactaagatgcctcatacttcctccgtttcacaatgtaagttattatagcatttctcacattcatattgatgttaatgaatctagatagatatatatatgtctagattttttaatatcaatatgaatatgggaaatgttagaatgacttacattgtgaaacggagggagtactaataattttagtcatgctcagctccaataccaatctaaaaacttgaagctgaagtgacagggttggtcctaagttaattgattatcatgtgatgactaatatgataggtgcatgtgtcattgatttggcttttagtactgtccataaaggaagtatctggtggagtaattatgctatttactggtacctcacaactaataagaaagtcggtagcacaaattaacagtagataaagcgtggcatgcatgcatacacggtgcatgcaccacttaagctaattaaggtgaaaacctttaggcatcttgagtgctattcatattgacatattgcgtgtcatttgtagcatatgtgtgcacgaggtttaatttagggatatgccagcaagcgtgttcatcagatgttacacttaacagcgaagtatgagtaacaacaacggtttggttttgggaaacttctgacgaaaggcagctagctggcccccgatgagatgatacacatgatgatttattatgatgacaatatttcatatatattctgttgacatagatatttcacagcacgattttttgctagcttttcgacatggtaagtcagtgttggtcgtgcattagttagttagtactcgctgtagatgtagtaacgagctagagtatcgatcacttgtaccgtgggtaccaatttggtcgcggcaccattaattgagaaaagattcgagtgactggccttctactgggttctctaccaacatatatggataccacaaaatcaaaaggttttggatgaacagtccacgtcgaccccttccaagatgggtgacagtacacaagatgtggttgatcgatcttaatagtactgtacaaccagctagctaaacccagatcactgtacactactaaagtgtgtgctctaaatatatacagcatctcaatcacactcacacattcacgcaccattaatactgttcgacgagcacgtactttccatattgatgaagcaacaaatcggttgccacacgcagctctccggttcgtgttcctaaaagaagagctgttcgatctgttggaactttttgtcttgcccgtactgatatttactccctttttcagcttaaagaaaaggtagtgctactaatctcttttttttttaaagtacagattatctttcacgtatgaactcatttcagacgaagcagagcaatgttatgtcaaacccttagtcacagtgaaggagccaacagcatcatcgttaagggcgagcacagcaaggaggcacgagggaccaccccctactgcatccaagtccattagatgcccatagtgtataccactcaaggcaagagggcagtcggcagtatatagagtactagttggcatgttaggaaagcaaacaacgttcgtatccaattgatgtttgatttatgttttgtctcctattttagtcactaccgtcgcgttgtctttttttttaatctcctaaattttaatcatacgtttgtcactggtcgtcgttgagtccagatgacttataaagtttcattgcaatattgatcagcttttatttatgtcgaaggcaaccagtagtagtgggaggaggaagtaggggagccactgcttaatcgataacaatatactttttccgtaaaaaaaaactcaatctaagaaaggtcacaacaaatttgaataattattatatagatttgtcgtatcaagaacggtcacaagttttgagttttttttagagggagtatggcagatttcgaagatacagacctggtctatcaaccatactcgaatgcatgcgtggtcggtcaatcatatcatcatattaagctgccagatatgcacacgatgattgatcagtagctagctctgcctacgcaagtgacatgtactacgtatttgcgattgttgattggtttcatcgaatgggcatgcagatgatcgatagctcgatactagctagcaccgaggaggaaataaccaatttggtcttaagctagaacgaacggatatatatccacgttgcatttatatttttcatctttttcatgagaaggccagagaagaggaactaattaacggatggacacatggcggtggccggcgacagacaagtgtccaacttgtccactgtaactgctggatgccggctatctagctacagtgctcatggggtgctggtaaccaccagtttgatcgatcttgagcttcagatagacaggatagtacagtggacctgcagtactgaaatctcccccatgagacgatgggtcctcccgatttgttggaggcaagcgtacgtggagcttcgcagggaatcgacggtggagctccctcccctcgtctggatcggtccctccaaggctagcagttgcacatggccggtaatgtcacggggctaggacagagtactgtgtgccctctgtgagccgagatccacacggtcccaaccctcccacaatttgatggttcaccagctaaaagaagttgggctgaatgtggcatgggaaatcttttgtgaaggcggcctctcctcgtcttcttgttgccttttgaatcgtagcaaaacttgaaaatttaaaactattttttagagagtcgattttgagtggttttgtttctttcatcgcagcattggtttttaaatcgatgaaaagatataggtataaaagttttgacattgcctactagtccatttctcaacggatagttattcataagtcaaacgagcaaagctgctagttttgttaaatcaaacgcatagaaaaccatacaatttatatcttccgctcctttcaccctcagaaattttagtgtttttagacaagttggtttatgtgcaatcatccaagatatacaagagctaggtgagcttaagattctgagaagtaactgtttgataaccatcttctaagaatctggaaacgttgggtgtccaacttctgacttctagtttattttctggattttataactacagcttcttagaatctggaccaaaagttggggtctgtttgggggagcttctagctgctgcagcttctcccagaatcataagctcccccaaacagtccagcttttgctccagattctgagaagctgtagttgtagattccaaaaaatgaactagaatccagaagttgggaaacctaacttttacagattcttagaagctaactaccaaccagctgcttcttagaatcttaatctctctcaaacagaccattggacagtttgggagaagctgcaacatctagcagctcccctaaacatcccttgtatcttattgcccatagggatttcaagatttgccactcatatggccccatcgtcttgcttatacttatgcttaaattttaaaacttagttttacagatgattttatgtttttcttattatggtttattttacaatatttggctttgaaacgctaagaacacatataaaaattatatttataaattattttttattgctaataagtcgtacatataatcataagtataagcaaaataatggggctgtatagtttcttttttaggtttagccattagggtatctataatgggaccataatgtcttcacgtggagtcccaaatcctgaattttgtcaagtaatattgggagcgacaaaaatgctaaaacaggcagaagccgaatgtttcggtgggctatcagttatcagttcactttctgggagtggtccaaatgattttgaaggcccatccataactcaagatcctcatttgtgctgagttatggagttgagcaactatccatctactatcacatattcacatgttggatagtgggtcatataacctggcagagaactggcaagaggtcaagaaggagatgggaaggaattgttaatgggctttatttgatttttgcatttatgcatggattgggccagccttcttggagttgatgactcggagtgatccgtacaaaaatatctccatgggccgaataacaaaatcctttttaaataggaataagttcactttggtcccttaactagttactgaatctaaggaataagatcactttgactccctcaactgaccaccgaatctaaatcgtatccctcaactgcaataccagaaatctcgaccccccgaacttgcaaaaccggtgcaatttgactccctcagcggttttggggtggtttcgctgatgtggcgccacgtggcacctatgtggcgatattgaccgagtcttcggtcaacgtggcgttggcgtggcagtagaattaaaaaatatgcgtgggacccattagtcattcacacaaaaagaaatatgggcccactgacatgtggggcccacatgtcagtccttcctacttcctcctccctctctctctttctctcaatctctccctttcttcccattcggccggcgggcgggagggtagcgagagcgagcggccggcccagctctgcctcggtggggaggcggtggcgcaccgccggggtccaccgacgatggcaacggcgcacggacgagtggagcagcggcggccatcgtggcgcagcagaaccggagcagcgacagccatcgtggcgcagcagaaccggagcggcggcggccatcggagcttcttgggcgccgccagcgacgagctgacggcggtcgagtagtggagtgacgcggcgcacacgagcaggacaacgccccggccttctccagccccgccgccccggtcttctccagcggcctcctcatcaccccccgcgccagtcgctttgtcaccgacgacgaccccgcgagccgtcagagactgtgccggtaaccgcgaggacgaggatgacgagcggcagcgcgggtcgccgccaccgttccccttgtcctcccactgccgcgagccactacggccgagccgccgtcgtcctagccgctgaccgccgcccctggtccggttccgatgcgcctcgatgccgctagccgccctcctgcacgtcggcctaatgggaagaaggggagagaaagagagagaagggagagagggaggaggaagaaggaagggctgacatgtgggccccacatgtaagtgggcccacattttttttgtgaatgactaatgggtcccacacatattttttaattctactaccacgtaagtgccacgtcaacgccacgtggaccgaagactcgatcaatatcgccacataggcaccacgtggcgccacatcagcgaaaccaccccccaaaaccgccgagggagtcaaattgcaccggttttgcaagttcgggggttgagatttctggtattgcaattgagagatacaatttagattcggtggtcagttgagggagtcaaagtgatcttattcctgaatctaattcttatccttgaactgcaataccaaatatctcaacccagctcctattaaaaccggtctaatttgactcccacggtaattttggagggcagtttcgctgacgtggcgtccgcatggcagtgttgacgtggtctgtggtgttaacgtggcgcttaggtggcattagagttaaaaacatataagtgagacccatttgttattcacacacaaaattacagggcccacgtgtcatcctctatctctttcttcttcctccctctccctctctctctccctcttctctctttctttctctttctctccccttcctcttcccctttggtcagtgacagccagacgggaggcgagggtggcagcgggtgggagggtgggtgagggctggagcggcaaaggcgagcccacagtggcgaaggcaaaggaagcggtgtgaagaagaaaagaagaccaaggagaaggggagagagagccatcctcatcaccgccgtcgacgccactgccctagagctccctggccaagctccatctcgtcgttgcgatcgaccaccataggtcgctgccccgcactccctcgctgtccccgcaaagaagataaggagaccggggagaaggggagagaaagagagccgtccccgtcgttgcggggcgccgccgcctagagctcccttgccgagctccatcccgctgctgccaccgtcgaccgctagtcaccgccccgcactcccttattgtccctcgagctccggagcggcgatggtgggacaactacggggatcggcgacggcaagggtgcggcgttgggggacagcgtgtgaaggcccacgcccgcgccatggttgaggaatgagaggcgtgcgccatctcccgtgcccatgcctgcgccatcgccgttgcgcctcgcgcgccttctcgcccgccgctgccgctccgatcctcgctgaccgaaggggaagaggaattttctttgtgaatgaaaaatgggtcccacacatattttttaaattctaacgccacactaggtcaataccacaacgttagcaaaaccgtccttcaaaactatcaagggagtcaatttacaccggttttaatagttaggggtcgagatatcgggtattgtggttcaggcatacaaatcagtctaggcctctagttaagggagtcaaattgaacttgttcctttgaactataccctgacatgaaatgcttgatcttctattttgagaaaatccgctatgtacctttgagaatttgttcaatcccttgtgtgccgctaaattttgccttatcccttatatacccctgagtttttattttcgtctcctctatgcctattctgttagttgaccattaaatgttttttaaattgactatattatccctctcttatatttatgtgctagtttagtaataaaaacacaattcttatataaaaaagatctatttgtaaaaaaaaacaaaggaaatatgattatttgacacttttttaaaaaatctaaaagttttaaataatttttaatttatctttttgaaattcatacattgttttcatcaaaatttgaacccaataaataaatagtttcggttaaaaaaaacataatttctagctaatgctcttatatggattttgtcaaaaaaaaaattgttcaccaatttaatttttctttttcgaatttaccataactaattattccccattttattttatcatgaattacagtttttcacattatgaattatgaagtagatatagcatgtaagtatgagaaatggacgatatggttattttagaaaaatctaacagttaactcacaatcaactaacagaatatggatgtaggatatcaaaatgaaaattcaagggcatatagatggtgagccaaaattcagagatacacgaatttcctctataattttagttgaacttagaggttcaactgttcaatcctaatgtagcaaaggagaagcgaccatttgttttcctcatgctctcagaaaaggtttcggaataaacagggtgctcaatacgttcaggatggcgacttccgttttctccagagctgattcctttggcgattgcaatggcgattgatcttcatggcgactccctcccccctggtggctgggatttttcccccggcaattagctaagggatcagtgctggcaaattcatggtactccggttcacttttcttcgtacttcagtccttctccttttcgtttggttgttgacgtttcgcgatcgaccttttgcttgaatgagaactccctggctttagctcttcgggcttgtttaggtggatctcctactgatttctatgttagtcatataagggatcgatgcttctctttctttgtgtatttataagcttagatcttttatctgccgccatttcatcttcgttttttcttgtggcgcaatggaagtcctaattggtcttatgagttcatgcgctgggaaaaagagcaatcagatgaatggactattgtcaagagaaagaaaggcaaatctccttcaaatcattcagtgatcccagtctcatctgtttttaatcgttttcgagtgcttaatagttcttcatctcgtcctgctggagttctgcttaataatgtttcttctaaggagccagaaaaggttgctcgacggattgccgacggtgatcatcgttctgatagtcatgattcgtcttccatggcccctaagtctttgtccaatgacttagtctctcatcagaagaccgataagcctgatccgacttccaagcataattattttaaaaaaaatattctatccacccctttttgggccatgagaaaaagcccatggatcagcccaagggagttaagccacaaccagtttcgtggaagccgcaaccaattcgcggaaaatttgggtgcaaaatctcctataaactctgtaatccccactgtgtcgcatcctctctcttcacccgactccacagtaaacccccctctttctccggcgacgaactcgagttcaccaatggcgaaccttcaacctcatcctctctggttcatcccgccggggcagcacttgcatccggctggtccaaatcaccgtcgaagggttgacacagtaaacttcattcctactccaatgcggcatgaggattttgtgctagctattgttcatcctgctttacctgaagacctttgggatgaacatagggctgagattagtgggttttttgaacaagtcagccatgttcgagttgctgcttcttttccacacccaaatgttgttgccctgtttcagattgattctccggatcaaagagatgcacttgttcttgggctgcctattaactatgatggaaaccatgaggttagatttgttaggcatgattagggtccaaactggcgtaatgttccttatgatcatagagggtggataatgatgcttgattttcctttggactatgtcaatttttataacatcaatcaagtggtgtctacttttggggagcttgactggtggtttagctaaggtttggtacaaggatctatactcagtgccccaatttgttgtttgggagcagcctaatgctccaaatggtcagtcttggaccattatgtttatattttaaatggtgaatttgctgatattttaccacctgatgatgatttgccacatggtgaggggcctgtcgatccaaatgttgaggatgcaccagcctggcagtttggaaatgaacagcagcagcataatcagcagaatccaaattggggagcttgggaggataatcagggaggtaatcaggtcgatgaacatcttatgcctcttgtcccacagttgttgattgatttgcaagcaagctctgcaagctctctatctacttacccttctgctagctctgcaagtattgcggattcggcagtcagcatatctactgatgaacaggctttaacctctccagacaagagtattgtggttcataaggattctgttcatgctgacttatataattatctttgtgagaggtttccccataccatgtttgataaacactttactcaagattcttccttttgggctgctctcagtattggaccatatatgcctggtgaatcatcttcttctaggcagcatctgggctatagtcagggaatggaatcggaattgccagtacttatgcttactcatttggttatagtcccacctgtggtccatgtgcttcctgctccagttaagagtccaaaaatacggattgacactccaatcacaactgttgggttaagaaggagttctagattgtctgctttaaatgatgggcacaaagatgaatttctcactcagccagatccaaatcagggcattgggaaacctagaggtaaatcagttaagaaattgaagcaagtggccaaggaggtaggtcttctgttctctggttgtgatctgcaagactcggattttgaggaagggtctaccactgaagatgcttctggtgcgcctgctgactgctcgtgcctcttttgcaaaaaaatggcagttgatctgtgtggtgcttctgctcaagaggtgtcccaaattgaccttttgaagacgcgggctccaaatgaatctgatgggaacaattaagtccttccagttgcagtctcttttaggagtcaagaataaaagtgtgattctttcctgttggtttagagtttatgtgtctgctaagtctcatgtccttcatgttccttttggctgtaataattcccccctctggttgtgcaggtttgctacttgctgttccttttgtcgttccttctacagtcaattaagactgctttcctctgcattgttatctttccagcagtataactttgttatattgtgtgtttccctgcctacctctagttaattatgagtaatcatagagctgaaggaaagtggaggacggttaggcaaaatattgaggagagtggttgttcagttttctgtctgcaggaaactaaaagagatttttttgacactgcttatataaagaaattagccccaaaacggttcgattctttttgtttctctccctcagttggagcttctggtggcattttagtttgctggattggtgctttgttctctgctaatgtcatcagcatctctagatctgcagtcataattcaattttgttccaagcataatggtgaatgttggactctagtagtagtctatggcccctgccatgaaccagatagatcggcctttgtgcaatggcttcatgatttagatattcctgataatgagaattggatccttatgggagattttaatttctatagatcagttgacaatagaaatagagatggtgctaatatgaatgatataatgattttttaatgaggttatcagtaatttgggaattcttgagattcctcttaaagggaaggcctatacctggagtaatatgcaagattctcccctgcttgagcaatgagactggttttttaccatagtttcttggacttcctcatatccaaatactttagtcaaatctctctcaagagtcgtttcagatcatataccttgtgtggttcaaattgtaacttctatccccaaaacaaatctgtttgggtttgaaaatttttgggtggagcatgaaggtttttttttatttggtctcttcaatttggtgtggtaatgggaactgccaggattcagctaaaaatatctctctcaagttcaaaagcttaaggaagggcttaaaaaagtggagcaagggtttgcccaggcttaatttggttattaaaaactgctctttggtcacttctttcattgacagaatagacgaactcagggatcttactttggctgagtggaatctgagaaatattatcaaagggaaagcagttctatatatgagatacatacatttatattgcaaaagagatgtactgttagatgggtcaggtttggtggtgagaacaccaaattttttcatgcagctgctacagaatgatacaaaagaaatctaattactcatcttaaatctaatgatggtatctctctctctgggcatgctgagaaggctgctgtcattttctagacttttcagcaaaggatgggggtaacttctaagcccaaaatgcattttcagcttagtcagcttttatcaccttgtgaatcacttatcaatctgtttgataatatttctatctctgaaattgatggagttgttaataaaatgcctatagatagggcccctggacctgatgggtttaatggcctctttatgaaaaaaatgttgccctttgatcaagcaagatttctatatgttgtgtgctcagttttgtgaaggtactctctgcttggaaagtctgaataggagtttcataactcttgcccctaaaaagccaaaccctgagaaggttaatgattacagacccattgctttgcaaagtatagctctcaagctaataaaaaaggttctagcagacaggttgcaatcagttattattagtctaattcaccaaaatcaatatggtttcatcaaagctaggattatccaagattgccttgcttggtcttttgagtatttgcatcagtgtcagaaatccaagagagaaattattttgttaaagcttgactttgaaaaggcttttgacactatagagcattctgtgattttggatgtcatgaggcataaggggtttgattcaaaatggctaggctggattgagaaaatctttacttctgcttcttcttcagttctcttaaatggtgttcctagaaagtctttttactgcaagagaggggttaggcaaggagatcccttgtctcctcttctttttgttttaggggctgatctcttacagtctattattaatagtgcctatcaacacaatgtaatatctatgcctatcccaactcctgacaatgattttccaattgtgcaatatgctgatgatacgctactcttcttatctgcatcatcaaatgagcttttcagcttaaaggcaattttgaatacttttgcctcctcgacagggctgaagataaattttgagaagtcatgcctgattcctctcaatgtgcagcctgaaaaagtacagcacttatctaagatgtttggttgcatgattggtaccttgcgattcacttacttgggtttacccatgggtataaataggcccaaggtaattgatttcagccctcttgttgatagaattgaaagaaggttgtatgctacctcagctttgctatcttatggtgatagattaactatggtgaactcagtgctctcttctttgccaacttactacatgtgtactctctctttgccgaaaagtgtcattaactctattgatagagcaagtagacattgtttatggagaggatgagacataaattcaagtaagaagcctttagttctttgggatagggtttgccagcccaaatccaaggggggtttgggagtaatagaccttaaatttcagaacaatgctctgttgatgaaaaatcttcataagttctataataggcatcctgttccttgggtaaatctaatttggactacatattaccctgataaagttccacatgccttgtctttaaggggttctttttggtggaaagatgtcttgcagttcattgatattttcagaggcttatctaagtgtacagttggtgatggcaagacttgtttattttggactgacttttggaatgataatataatatcagtgtcttatcctagagctttctcctttgtaagaaactagaaagactcaatgctgcagacttctttaaaggatctatctcagatgttattccttcctttgtcagatctggcctatcaggagtatcttcaaattcaaatggcagaccctttggatcggctctctgatgagtatcataaatggtcctatatatggggcaatgacaggttctcttctcagaaaatttatgctacaaatttcatggatgtgcagtcccctgtatatctaaaatggatctggaagagtagctgcactatgaaggttaaggtttttggttggctccttctcattgatagattgaacactcgtgatatgcttgacagaaagttttatgctcctcaaggaagtgatttaacctgtgttctatgctcatttggagaaagagaaacccttgagcaccttttcttctcctgtcccttttgtactgatcgctgggagcaatttggtatagtctgaaatctctcctactcttttgagaatatgctaacacatgccaagaactcctatcaatcttcgcacttcctggaaaaggttctttatgcggcctggaatatttggaagtaacgaaataggttcatttttgagaatgttgtgccttctgttccttcctggatgtcgttcttaaagaatgatatgtcccttcttgtttttccgtctaagattagatgatagataagttttttttgttcctggctagacaatttgtaacttttgtaattctattttttaataaaatgttttaactgtgggggcttcccctacagtgttttcctaaaaaaaaaagaaaaggtctcggtgcttgacaacagattattatacttttattaacatattattatacgttattccccgcaaaaaaaacatattaacgtttttcactaaaaaaaaacttgcaactgttatttagcaatttcaaaaaaaaaatcttattaggaccagacctagttgaaaaattgtaaagaaacacttttatttcaacaaaaaacggattgaacttttacatccagaatacttttggtgcgactacgtggttatacctagacaccaggtacgtgcgaccacggcggcgaggtgaaatccgcagctcccccgccttgtcgtagctgagcccaaacacggtcacgtggagcacgcatccatcctccgcgcacagggcgtccgccatgtcgaggccacggcgaagcgcgcactcgacgaggcagaacacgccgtcgcccatgtacgcgagcgtggcgcccgagggatgccctacgtgcctcttggggtcctcgcgaagcagcgtctcctcggtgatcttggaaccgagcgcggcggccgatgccgcggcgccgcgagacgcgacgtcgcaggagcagaggcggccgtcgtcgtcgagcccgacccacgcgtccagatcgtcgacgtagtgtccctggccctggaacggcagcagccagtcgccgagcggcgtccacgctgccgcggccggacggcggcgggcgatgtcgagggcgtaggtgccctgcctccggcgttcgtcgtccccggcgcgccggttgtgcgccgacacgaagacggtgcggccgtccgggtgcacggcgtaggcggtgacgaacatggggtcgcggccggcgccggcgaacggcggcggcgacggcgaggggacgctctcccatgaccaccgctcggcccgcccggaaaacctgaacgagtcgcgcgcggggtagtcgtcgtcgcggggcgccggcgacatcacctggaggtagtgcttcgacgcgctgcgagggtccagcgcgtacagccgctggccgtggacgggcaccatgatgcccggcatcagcggcgccgtcgggcgagggccggcggccagcgacgacgtccccgtgtcgtacatgaagacgggagcatcctcaaggagagcatgcgtggcgatgacgatcttgctgccgaccgcggccacggccgggaaggagaggtccaccggcgcctctatgcggacggcggcgtgctcagggaggtggtggaacatggcggcgccggtgccggaatcggtgaactcgtcgacgtccagcttgtggatgacgtatcccatgtcccaatcaagcaccacgtagatgtgtttatcgtcgtccctccgacgtgaccttttactggacatggcggtgttgctgctgtgctgatcctgcaacgcccgctttgagctcaacatcgtatcttcctctgcctgcttcgcgcgcgcgagtaaacgaataatcggtggatttcggaataggatttataggcttcctcgccgacggattcgccgtgactaattccaattccgtttcggaagtccgagtggattgcaacattcccacacggcccgtttggttgggattccgagactggcccgcttcggagtcgctcccacccccggaaccggatcgtctgactttgcatagtaacgtcatgagcgtgcagttctacaatatccaccgtccattccatcctacggtcctgcttgctctatcctcgcactggtgcacaggcacccaagacggcaagacccaacgttaggcccacaaaatcagtggcactgtaaagtgggatttttggattagtcatgagaggctgttaattttggattagcactctcagttttggcaccgttgacagttggaggtcctactcttgctaaaaatcagttctatgcatattgcatatattgctcctatgtatatctataacttaatataaatattcgtatttttccggtcgtcacaccggtttttcgtcccgcttcgtcgcccctcatcccccaaaatcccaatccgaatccaatcaaacctcgtaaaaaaatcacaatcacaatcggagttcaatcacacaaatcatgatgcatgtacacatatatatccaaatataaaaaccaaaaattagatcgaagggagtcgccgccgccgctgtcgttgccgaaccaccaccgtcgccgtcgccgccgcagggacggctggctgccggcggctcccctcccgctggatccggtggtgggggagagcaccgccgacgccgtcgtcggtggtgggggaggactccgccgccgccgccgctcgcgggaggaagggcaccgtcgttctcgttagatccgcgccggtggtgggggagggtgccgccgacgccgccgtgggtggtgggggcgccgccgccgacgccgccatcgcagtcggatccatcgccgccggatctagggcgggagggaggcgagaggggagaagggagccgcagccgccgccacgaccgccgaatctgccgcgggagggagcctagagggggtggagggagccgccgcccccaccctcggatccgccgcggccaccaccaacccgccgccgccgacccgagagggagaggaggaggggggagggggggcgccgccaccgccgccgccgctcacgggaggaggggtgccgctgccgctcgggggcgcggaggggagggcggcgaaggcgaagtgagatgggagggagggaaatgggctagggtttcggcggctgagagggagagggttttgtttccccactatcgacgctcggccgtccgatcaaaaccctagagatcggacggccggtgtcgtccgggccaaaatcggcccaagatggatcgagagtgaggcatcttttctggcccaagcctaggttgcggcctggggaagaaaagtgagcccgcgcatgcgcaaaaggccgtgggccaaccggcatgggccggaaataagtctattttaagtccctcgggctgaaaaaaagagaataagttcatttttagcgctcattttttcagaagcattacaattatagttattgaatgtgtttatttcgaagcaaacctaaaaggaagtatttcctttctttttccaattaaataattgttaaatgatgtttgtattaataaaattagcaattaagctctgaaaattccaatataatttcaaagagcgtaactaatcatggggaattttaaaaaaaattaaatttaaccatgtcattttatttctcatacttgctctacttgtaaatttatttaattatacacatatacctacttaaaaataccaaatatttcagagaatttgtattttaattaattgcatatttttctgatatgtacgcttcccgttgcaacgcacgggcacttttgctaaaccaaccaacacttttggtcaatatacacactccgtaatcacccggtgtaatgcacggacactttttctagtagaatatatatttccttaatgcaacttcatcgaccaactttgcaagtacctatatacgtatgttgttttttccttttttcttttaaaaaagttgtacgctcataacacatacacattcatttctataaacgtgtaaacttacgccctaactttatgagcacctcaaaaaaccataccggtatatatatatatatatgtatatatatatatgtatatatatatgtatatatgtatatatatatgtatatatatgtatatatgtatatatatgtatatgtatatatgtatatatatatgtatatatgtatatatatatatatatatatatatttatttatttatttatttgagatcaacaaagtctacgaaggtaattgctaaatgttggatgggctgtgccgccgtgagccctcttcgcgagaggctcctgcgtgcgcacgtggcccactaggcctggcaggttggtctgggctgcatgacagcgttatgggtcgggctattggatggggtgcagtgcaaacacgggattgctaattagcacagacgcgccattaacttaagtcgcgcgcatttttttttggcccacagctctgcggcccatgtcctcacgcacagcccatttccttttttcccgtggcaactgtcttttttcgcgtcgcgaagctgccacacctgcacaaaaatcaggaaaaaacgtgattagatgtgttgtaaatcaacgcgcctattagcggatcaccggatccgttccctgtccttcccacaacagtataggcgtgagatgatgtagaacacccgcgcccatccctttgccgtcaagaacattgcagaagtagacaattaatacagatatagggtggaactctctcttcattatagatcttatctggagtacaagccaaccattagccatagatgtcacaccctccccctgtatatataggggtcttagtaggagatagatcttatctctactccggttcggattggtccacaagaaaggatctttatctccccgggagataatattccataacactcccccttagacctatccgcgactaactcatgcctcgtcaaaactcctaccaaaacccagtgggaaaaaggctaggagaaagagtacatagttatcgctcatgcattgcacgttgttgcctcgttaaaaacctcatgtgaggaacaacagcttcactcactcaagggaaaaagagtacaacactaaggactacacggtccatactgtgggtcatgttctagggtgctctccccctgaacctagtaaacatcaaagtcttctcatcccaattctccggaaaagcttccgagaactaactgttgggagagactaggtgatcaatcctctagattattactcaacttgaattgctactcacatcacctcgccttaggagtctgtgagatagcccacttgtatttggtgtcggtcaataaagacagatctttctatgataggaccttagaaacaggtctaagtgatcatcatcgagtcaatgctccgggcatactctaagacatttcaatgtctcgcaaatgacaatcaacacatagcacatactccccctgatgacaacctttgtcacagaccatgttcccatagcataaaacatctctcagacgtatgcgtgggcaagaatccttcagatcctcaaaccattagtcttaaaagacttatctcatttcatcactaaaatgagaatagggaacatagagagtaatgcattccatcactatcatataccacaataccatactgttgtgcaacgcaatctatttcatccttcagaaggattatggggataaataagtcgcaacggcacgcacctcctcggcgtgactccatcaagaactaggtcttgatcattgcaactttctctgacgatgtcaacaacaattggggatccacaagatcaaccacaagccttccaaagacatgttgtaacgatcagagtaactagctagtctgaaaatttaagcactgtggggataacacacagccaacaacaccaagtatacctcaataggtattagaggacaccactgttcctaccatcgggtagaatagatatcacgagtgtacacactccagtgataatcgtgagatgcacatgtgcttacagaccccgtctgtttgatctcatcgggttcctcatttcaatcttatcaggtcataaatgggtcatcatccctccaagggattatacaatatggtgtgttcagacttactaattattttgtatctgagaggaaaattcatcaatgaggtctccccctcagagaaaattccgtcaatgtgattttctcccaacgggagatggtactcttaccggaatacccattggtacgagatttgcatgatggaacttcactaccgagtctattcaagacctcacggatttcctaaatccgttagctgcatatttaatttcatgccattttgccaatacctttatttagcggaacattcaacttacgtgggagaggtctcatctaggacctacttgaaccatcgcgcatcaccacctcattatattaataatgacccataaaaatccgaacaacgttcgcgattttcaattggctattcggttcaacctcaattacatttccatttgacccgatttgagcatcgtatgctcatgccatggactttttccggatccgggttctctcagagagaatcattagcaagaggcgacatagtgtcgacacatttattcccacttacacatttaaccagatctttgtcatttcccaaaacgatcgatccatggttgttccgtattcctagcaccatcatatgcgcgcatcgctaggaatgtcgtctccacgacgaccatcattatgaggtatatcaccttccaaaggtgaattctccaccaggagaatcagaggagtatgctcacatcttgtgagaactcttatgctttgactaagacccacggaccgtgttagcaggcgtccccgcagaacatgatcaaatgccataagtcttatgtggatacgatattattcccgggtctatccacatttaccacaatttggagcattactctatttaacaattatccaattgttcctcatatgattttgttggcaaaaactccgtgcaccaagcaaccaggagtatgaactaaacatacaagttcagctcatttagtgtgttcactcaaagaaatctccaggcattccaaaatgggcatttctctccccctaatgccgagatgtgtttcaatagcatactaccaatccccatatcgtggcataggattaaggaatttcacctcgatcacaaatgttctcccacgaatgtatgctacggtggtgatatatttgggaaatatttacgcactttaataggagagatttttcattatatgcagtgagcctggacatataccaatacagtggcatgaatattgtattcttccttcttccgaagggttatcctcaacctcctagttaggatatacaagtctgcaaaaaccaccattgctaccaaatgtatatgcaaccaacatgcaaatactttagccaaatgcactcgccatggattaatgctcacctagtgccattcaaactcacaatcgattctggatcgacgtgcattagacatcgcatgtcatatgcttaagaaggcaacctatggtggcaaaacgcattccgatgcgctcaacaaggagtatgatagcaaagtgcgcggccactagcctgctctgccaagcagatttttgtggtgcagagttgtgttaaagtccagctcgtctaatgcccaagtttgaccccaattactcataccaaactctagaattgggtcatagttaagtagcatgtattaggtacgatccacgagcgaattatcaaaccacatttgctaatgtcccctggacatagccatcgagagataatccatacctccgacaatggtaatattcacaataaaaccattatattcagacatatccacaaaaatagtggaatgtgtcggtgcaaccgtcgttggcataacgagctcaacgcatgcaacacgacgaacctttgcatggccggcacaagtccacacgcgaaaaacgccagtgtgcgacaaacatggtcatcaacccgtgggtgatcaaacaacacaacctgggagtagttatcgactacgagagcgcgataacacgcaatagtgcatagccaacatttgtctgaaatacagttacgtcgaactgtgtgagtggttgtaactcctcggattatacactaattgttcttctaaactaaagcattttatcaattccagcataaagataagctttagaatagaacaggaaagaccaagaactttatttatctgagaaatatcgatctaatgcaaagttccaaactaagcaaatgataaactgcttggcaacagtatagtcgaccaatgtcctcctaggacatgctctaaactagccatacaactcccgttgtcaaaacaactttattagacaaacactagcaacaattggtcaacaaccagaggtggccatttagcgctagatccacccgaggaccgagactgggtcaacacccaagtcaagctgttggcgctatggtgaagtgggaatcatacctattctcagcatctacccttgggtttattcctctagatttgccttctcttttccggtgtcctcgcaagacatcaggttccaaataatattgagaagatatgtgcacaccaagggcaaccatacgaacagtgtcattccaccacatggaaaacactttatatctttcaccgggctaggtgaaaaatatctcaaattattgaacctcgcaactccacgttgccagaaaattgaggtataatcgtttatctccaaatcagaaaagcgtgctctcaaccattgggaaagcaaaaaaatgtcgaccgtagtccgaccatactctgattgagatgttaagccattaggggaaaggcacaatgaatcccaaacacattgtctaattccacacatttcaacgactcagaatcccattcttgagtgtgatcatagggatagagtgatctacattaatgcccaaagccatacaatagtcattgaaggcctttacgtgaaatcacccacactatcatccgaatcgtttcatgcggttctcagagaacgcaacacgcaaacggatgatatgcgcagtgaaatcggcaaaagcatggatctcgtacaacaagtatacgtgactccatcttgtagacacatcgatatcaccatttatgtatggaggagtgtatcagtaaagagtggtcttatccatagccatggatatttaatttcccagaatttccatgcattaggtgattttctattatttacttggtcttatttggcattatattcccaatatttataccacacagaaaaccatcacacataaatgcatgaaaataaacccatcataatgcttccaaggggggattctacactatgtgaacacaatttatagaaacatcataacctagagaaccatctctagattatttagttggaattgcattaattttaaaagcaaagcaatgcttaaaaaacaccattacatggttatttacgagtccggagacccacatgcaaagccgaactatatagggcctaagcaacaagacatagacacacaaacaaaattaatataatctcttattaattacaaggttcaaactataaaattccattaaacagtgaactatagcgtaaaaacccaacactccaggggcttaaacgcaagttaccaataaaccgaaattaatcaggccgaattaccgttcaggccacgatcttatttgggctagcaagcacagtgtagcccaaaatgcctaatgggccgaatttcccaaactctaggcccatgaggatttccaggtttattatttttattaatttgtttgggttgtcttgttactgttgggctttattcggtcgggcggaggcagaccggcccagccggttcgcctaagtgaccgagagagggaaggggagggggggaattagggtttcccctttcccattcattgtccgcaacgacgtccaccgcccggcgcaccggcccctcaggcacggcggcggcattggaggccattgactgtcgactttgaagggatttagggcggtgcacggcgaggaggtcatcgacgacccatccactacaccgattggcaggacggctatgatgacatcactcctgtgtggcaatttggtgcggcggcggctcggtggcacacgacggagctccgcgtcgacccgcgcatcctcatgacggcggcgaggcgaactcaacgacggcaactgtgaccccaacaacggcaaccaaattgcatccggccatatcgtctcggcggaggttaatccggtagcagacagccgacgacccatcatcctcccaccacggctcgacggcagcgtcgatgggaggtcaacggcggcggcgcctcgcttcggcattaactccggcggcaacggcgatatgggtttagggctttttctgagacggcggtttcccgcgacggcattgacgtaaggccgacggcgtacccaacagcgacggcgaacgatggccaacatgtctctaagtccgactacacaggctgagaatatgtcaccgtattcccggtgtggcgtcatcaaaagaaagagagaaacagagatgcaagggaggcgggcgagacggccgattcggcccagccgaattaggtacgtctccagtccagggtttcccatcaattttaatgatttctctcacacggttttctctagttttcatcaaataaaatagatgcatatagatcaaaagcaggaaattaatctaccgctagatcaagagcaggatcaaaaatctactgcaagcaaagcatccataatatgataaaaacgagaaaatataatcaatctataaaaacagcatatcttaatagacacatgcctggatatatgtatctatgaattagtaaattagtttagaaaccaatcttactaattacccaggttcgcatgctcacaaaaatctttcacgtgcatgccgcctcctgctgcgtcgcaggtcgcctcaggaacggcgcggcgtcgatcggtatatcgcacgcatctgtacgtgcatgtgtacgacaacgatgacgacaggtcgtctcgcaagatacgctagctgcttagcacgcacagcacctggtgctcgtctcgcaaggaggcgcgacgatgattcagacctcgtcgaccggcggcatacatgtatgcaagcaaaacaaccatcaaccattaattaattaatttgtaatcagaaatcaatctactgatgtaagtgcatgtgtcgatgcatgcatgcagcatgcgtattggttgatttgccatcaatcttgtgcatggacgccaggagccaggtccatccatgcttgcgtgtggccagcacatgccatcgcgtggaggtgcggcgtccagtgtagccgcagccgcgtggcggatcgcgtggggacgaaccgacgaagaacgggccggtgcactaggagatcgagcaccgacactccctacgggcgcgctcgatcgtgcgagggcggcgggccggcggccacatcggacgacaggagtagtgcacgctgctcgcggcgtctccacggtttcccggctacctgctcggtttcccattgcgatgtctccgcagtcgcgtgatctcgcaaaggaaaccaggacaaaacaatagatcaatctgttgacaaaacaaaatcaacagattggaacgacaaaccggtgaacggagagctgctgataacgtgttgtaaaccaacgcgcctattagcggatcaccggatccgttccatatccctcccacaatagtataggcgtgagatgatgtagaacacctgcgcccatccctttgccctcaagaatattgcagaagtagacaatgaacacagatatagggtggagctctctcttcattatagatcttatctggagtacaagccaaccattagccatagatgtcacaccctccctctgtatatataggggtcttaggaggagatagatcttatctctactccggttcggattggtccacaagaaaggatctttatctccccaggagataatattccgtaacaacgtgaacctttacctgattagatccgataatcacggtcctatactttctttttttctcacgtaacattgtttttcttttttactaaagatttgaaacctatcaacttgaattttaaaaactttcaactacaaatttaaatttttaagtcaatttgaaaacatttaagtcagattttgaaaatttcaagtgggattttgaaaatttttgacttgatttttgaaatttttaggtcaaaatttaaaaactttcaacttttcatctcaaatttgaaaaactttcaacctagatttgaaaactttcaactcaaatttaaaaactttcaactcaaaatttgaaaactttcaacttttcatctcaaattttaaaaacttttaacctaggtttgaaaactttcagttcaaatttaaaaactttcaactcaaaatttgaaaattttcaactcaaatttgaaaactttcatcacaaaatttgaaaactttcaacacaaaatttgaaaactttcaattatacatttgcaaagaggtgcgtgaaagattaaaagaaaaataggaaaggaatggcgaaaaaaaaagaaaaacgcgtccggaggcgctaaaataaaaaaaaaaagtgtgaacagaaagaaaaaaaaggccgcgggaggaggcccagctagcgccccccgcgcaaacacgccagctccattccaggcgaggcggtgagcgcgtccgcgggagctggcaatgtcagccccagacatgtttttttttttgcgtttttgttttattttatttatttttaatgactttcaacttaaactttgaactcaaatttcaaaaactttcaacttaaattttaaaactttcatttgcaaattcaaaacttgagctaatgctaatcttgacctaaaagttttgaaatcttgatttgaaatttttctattctaagtcaaaagttttaaaatttgagtcgaaagttttcaacttgagtcaagagttttcaaatacaagttaaaacgtttcaatctagattgaaagtttataaatttgagtaaaaaactttcaaatcttaagtcaacagttttcaaatgcgagttgaaaagttttcaaatcttagcatcaaagttttcaaaatataagccgaaagcttttgaaatttgagtcaaaagtatttgaaatttgggttgaaatttttagaatttagttaattttatttttacttttcagtttaaaattgtaaacattttaggagaatttggtccttttttttttaaaaaaaagagttgttctcacttctcgtgtgggctttcttatgtgtgatttgcctgtggctggagaggaataggccatttgggtcacatctatgcaagtgtacaaaagctaccacatactctttttttttttttgataggaaccgaaactttattactgaggtggtccagccaaatcgctggtcaccaaacgctcaaggccaggtggagtaccggcccagctacaggggtctagtaaattacaacccaattttgccaactcatgcgctaccttattacattccctgagacagtaatgaaccgagaaagaaatgaaactgctagaaatgacattcttgatctccaaaatcacaccccccatggcggaaagattgaaagagttctcctggagtgcagatttcagcagcatcgagtctgtttcaagctcaatcttcatcatccccctttcacttgccgctcctacagccgctgcgcaagcaagaacctcagaatggaaagcatccatcaggtgattagctccgccagctccggcctgaaccaccactccattatgatcccagataacatatccccatccaccttgtttggtgctgcagtggaaagccccatccgaattgatcttcaggacatcaggaatgggttttctccattttgccgttctcctctccttcatcttttttttttttgaaaccgtattctcctctccttcatcttcccctctttccgattcaactttaaatattcctctcgctaaccttcattggatactgagccagctcggctcggctcgttctggctcggtatgttaacgagctgactcggctcggctcattatctcaacgagctaaaagcctaaaagtgcagctcagacttggctcgttagaaagctcgagctagctcgtttagctcgcgagcaaatggggacggaaagcgatttcgtcgcggccggcggctagcagtgcgcgtgaacaacaaggagaggggaggggactcacaagcataggacggggaagaaaacagcattgctcacgagcttgtccacccgtttcaagcgttttggaagtggatccagacagccatcaccgacgctggcgccggcatcagcttcggtttcgacggcttttggcggtacattcggtccttcttcgccagcgtcgtggccacgctcgccggcgcagctcacgagctcgtcgggtcgacggcaacaatggaagcatgcggccggccaacaggacctatgcatatgcgggcgggcggccggcatcagcacaagcgtgcgcaggcaagcgtccggtcggccgatgggcgagggagcgccgcgggatgggaaggacgacgacgcatcgctagcgctctaccgcgtacgcaagggaagcgcggcggcgctttgcggcggcgttgcgtaatttgctatgtgcttgttttggagaaagtacaccgaaggtccctcaacttgtcaccgagttagaaaacgctccaaccgcaaaaccagatattcggggtctcttaactaatcaaaaccggcaaaatgggtctttcggtgattttgaccctggttttaacctacttggcggttgaataggcgtaggacccacgtgagctccacatgtcagcgtggccaagtgagcctctccctctttcccctccattctcttctcccccccctctctctctcttctctcctcttctcttcttttggctagccggccggcagttgaggagcaggccactgggcgaggcggcggcggcggcggccggtcgcgaatggcgtcggcgacgctgtgtcgccgccgtcggtgaagcggccccgcgcggccgggcgccgcggcgttgggcgcggaggcggaggcgaggccgtctcgcttcgtttaagtccctgtctcgggcggcgaggaaggtgaggacgaggttgacgtcgaccgccgcggggtcatcgccctccgtcttggcggtggcgcgcgcctctcggagtcgctcgccgctcggcaccggcttcatcgacaacccgctcagcaccggcttcagcgccgcgccgtccctcgccgccatccccaccaaccagtccgtcggccaggcgtcgtagtgcaggcggcgacggggaaagagaaggcaggcggcggccggcgcgcgagagggcggcggcggtggggaaagagaaggcaggcggcggggagggaggggacagctatcgttgcacaatgtttttctggtgctggatctgctggaagacgcatgcgagtcattacttgacagcatcgttgcagagaatgcaaagcgtttctgctcgatctgaatgaagctatctggaggcaatgtaagcatcatttttccatgtaaccatgttcagtatctatctactatgttaccccgatacggggatacggacacggatacgcgacacggcgacacggggatacgacattttccaaaaattgaggatacggggatacgctaatatatatatatatataaattaaaaatacagaaaagtagtaaattgaacagggcaaaaatagattgtgaataagtgctagaccacaaatagtgcatagaccacaaattaatagttcaacggtacatccaaactcgcaatgaccatagaagttcacatccagcccacagggcacgggcacacaactagtttataaataacaagttcacagccacaaatagaataattaggatagaccgataaacttgttcagtactctaagttcaattcaataataactagataggtagatcaatttaattgctgcttgtatcaatcatggtaactgaagtggctgaaggttcagcatcagcagacagatccaatgcaccaagatcttctagcaccctctcaaggtcaggctcatcaagtgaaagagcagcttcttgaagaaaatcagcaccaccctcgaacatctcaaagctgtctcctccaacatcccacattcttgatggaccagtacagtactcttcagatttcctggaaagaagacgcaaattctggtgcacaaacaccaaatcttcagcacgtccagggtttagcctacaataaagcaattgtagtcactgatcagttccatgcatttcaaacatacaagaaatttactaagtaagagaaggaacagaacttgtttctcattgaattatggatcaaaccataggtgctccaatttctttcagcacaagatgatgatgttggttgtccaagtaattttagcgccaatttttttaactcaggggcagagttaccataaattccccaccattgctttgcatccaaatgagctctatccttgattgagtcaaaggaattaaacccatttccaaacagcgagaaatctgcaaactgctgcttgatcttccttaattcatcaccagcaaaataccttctgaagcatttgtttctcatttctgaaatttctgcatccatgtgaggagcttcacgggttggaacctcagccaaccagctttcgcagtagtacctacattttataaaaacaattaataggctaacaacgactacaaattatggaaacaaacatttaaaagtagaagcagaacattacttggggttcagtgagtgtgccaagcaatgcaggggggtattactttttgcccatcgagagtacaagatctcttgcacatgaaagaaaaaggaggaatgctcatttagttctttcccttcatgacgataaactatttttttcaccttatctatcattgaatcccacatctcataaaccaaatggaggcaaggtttgtcggtgtcagctgcacgaatcatggaatagataggatcagtgaaatctaggatatactgcaccttatcccaccacacatcatttagaaccttctctttgacttgctgtgcttgaacttgattgtcttccctaataagaattccatttttcactcactaccatcaagattagagattctttgatagcacggaacctctttaacattacaatggtagaagcaaatcttgtatcaacaatggcaagaaattttagcttactgaactcattgaacatggagagcctcattgagtggttcatgatgaagttttttatgaaagaagaatctgctgctacctcagtgatccactgaaattcttcataagcatccccacttgaactcttggctgcacatatgttcttcaaggccaggttcaaggtatggacaacacacggcgtccaaaaaatgtggctgtacctctgttcaactatcaacccagcagccctgcaattagctgcattgtcagtgataacctgtaccacattctttggtccaacatcctcaatgactgcaatcatcttctcagcaatatattccttcctcttaatttctccttcagtgttgattgctcttaaaaacattggcccatcttctgtcactgctagaaaattcaagagtgggcgcctttgagcatcagaccacccatcggacacaatgctcacaccttttacaggccatgtcgacttaaggggatttaacaaccgctcaacatgtgtcttctcttgaacaagaagagtagttcgtagcttgttgtaacttggaggggaatagcccccaagcgcattgttgcaagcaaacataaaagccttcctgaaatatgggtttcttgcaacattgaaaggaatgcctacagaccaaaccaaatgtccaaatattagtcacatttgtaacacaaatatgagaatgtatgagttaataaaacgtactaaactctagtctaacctgctgtgtagaacattctcgcaatcaaagcatcaaggttggaacgagtatctgaattgaagctagactcaatagctgaaacagcccttctcttccccctactcgcgccctctgctggcagtgggatgtccttaggcaagttcctttcagcaactgctgcagctctagccatttcatcatgaagttgactaagaacatcgattgttacctttggacagggagctacaccattagatcccaccttcaagagatgtgctttaactcttgagtagctcccatgcataatattaccacaaagcctgcatctaaaccttacattccctccctggcctttacctgttttctccattaactcaacatacctccacaatggcttgttttcattgtcattgggaggaatcacacggcaagcattcaagaggttgcttgcccttgctggaccactagttcctcttgataaatcagtagcagaattaggagccggactaccactaggatggctagatgcactagcactagcacttgagcttccagttcgataatccatgggatctaacaaaaaaaaagatagtacttatactaagaaaagatgaagggcattgcattcttgcagatccactaaaactctaaacgaaataagaagagcattgcagtattgctctgctgcagtgcatagaatgctaaaagaggggatttattattcacctcaacaagggaacgaacaggaaaacagatcggcgacgacagtgttgtgccgacgtcacagtaggaggcggcgaggcgcagcccagtgcgcggcgccggcgcagctcggcggcggcgacggttgacgaggcagcccggcagcagcgacggcactggagcacgtgaggggcgttggtggtgacgctgttgggccagcatcggaggtggagagcagcgtggcggtgccggcgcagcccgtcggcggcaatggctgatggggcggcggcggcgctggagcgttggggaagagaggcgagagtgagagttgagaggcggcgcaggctgggtggatatgctccccacgcgcgcgcgggttttggtaccggcggaatattagggttaaacgtatcgggaccgtatcagaacgtatcggaaacgtattaggaattattttatttattttaaaatcaggataaataccgatacgtcctggacacgtatccgcccgtgtccgatacatgtccgtatccgatcgcgtgtcggacacagacacgcgcctgctttgccgtatcagtgcttcatagtctatctatgccatttgattgcgattcagaaaaccagaaaacactcacatcagcatgcatgtacccatgttcatacaatgtcaggctgaagtcatacttatcctatcttactataaagttattcccactaactaattaagcttaacatataaagataccacatcattatccactaacaagatgtcacataatcatctactaattaataagatgccacatcatcatccgctaacaatcatcacatttaaacattatacaaacttgctatatctttatagtttttataatttaagagagcttttcaaatacaaacatgttaaattatcatccaacataattcacataatgtttcaatatatatctttattatgttttatgatatcctattacttatatagttcatcctcacttagttagtgcttaaatgattaaactatggtccaaattatctttctcgttttttcctctaattaagtcatcatatcaattgtttttatcctttagatgattaatctacggtccaaactatctccctagttttcttcttccataaaatcataccaacttactttttacgtttgaatcaccattctacatactatttaaatttaaattatcataaaccatattaatttacttaatctgatattatatagctatcttacacgttattttttttattattatcatactaaattcccgcagcaatgcgcggggtttaacctatctagtatctttcgtgtacaccatgatttacactgtaataaaatcaccaactcgaattagagaagctgaactgttttgttagtaacacattgcacatgcaggaagaagccaagccacccctcgctgaggagcagcgcgacctccgcgtcagcgacgacggcgaggtagtagtcgccgcctcgccggtaggctcgggggacgacgaatccgacgcgtacgtggcctcggcggtgtcccagtggatgcccacggccgtgtcggcggcggtggcgagggacctgctcccgcgcttcttgtgcagcacatgttgggcgcacctcgacgacggcgagagcgcgtcgtcgaaggcgacggcgaggcaggtggctccggcagcgttccgcgtccacgtgacccggatgaggagctccttcccggagtgcagcgaggcaccgtacaccgccgtggtcgccgcctgtagcttgcgatccagcgcgccgccgcacccagagtcaccggcggcggcagcggcggcggcggcggcgatgcctaccgagctgtcgccgaagcacgacagctcctgcgtcgcctccggctttggtttttcttccggcgagattagctgctgtttgctattgctgctgcaataaaagagagagctgacgtggcacgctgacacgtggggtccacgtgggttccacgatgactcagccgtcacgtaggctaaaaccgaggtcaaaaccaccgagagacctaaagcggacggttttgttagttgagggatgcccagtatctggttttgcggtttgaggacgattttgtatctcgatgacaagttgagagaccttggatgtactttttccgcttgttttagcctagcctagggtttggcatattaagggctgtggtgggcctcgtggatgattaagctgctactataggccttgtttgatgggctatccaccggtgggcttcagcttgttttggctcacgtgcagctcgagctggctcgttatgtctaacgagctaaaatgctggctcggctcgttacgaaatttaaacgagccgaaccaagtttatcacgagccgagcgagctaacgagtcacgagcttcctgtccacccctaatgacataggccaaatcagctgggtctgtggcttttcctccttccctttctccgcctccatagtatttaatatggactgcattgcactcaataggattccataaggtctcttaagttctacgttgcaaggacctttcaaattaatttgaattatttttggattttggctatctgtcagtaatccctttttgatattgtcttatggagattggaattcagtatccacatgtacagtttcaattatgatggtatcagtttgctgtatgcctttcttttcagtgagatttcagttctgtctgtatatgtgaatctgatcttgtgctgcaagaaaataatgcttcgttttgctaatactgcagctgaaggctacacacatgacacatgtgcatatttttgtacgagaaaaatgggcacaattgatacctgataattgcatgcattgatctataaatagcctattagtactggagcaaaataaaaaatgcataacatagaaggctgaagctcttatatgctctcacaagtgtatggtggcaaagaacacatgaattttggaagtgattttagaactcacagataatgttagatcaaagaacactttcatactatatatgagctcacatactgaacaattccacatgcacagcatgtcacatttaacaaaaaaacaataaggatctcgttactgcacaggttcaactaaaacacagctctgtttagctcattggctgttaacaatcagctactgtccacttctctcatcatttacaccatgcgtactcttaactggtttagctcacgcccgtcagaaatcagcagcaggtcacttcttctccttatcaatttacaccattgtatgctcaagttgtaagtcagcataatacgtggcaatgaacatcgcttcaaaaaattcatcaagaagcccagaaaattgttcgttgaccatattcccgaaatctttttcagagaagagtagtttcctgccctctaccaccttcgacatgaaatgctgataagtatttcttaccaatctcagcaaggagagaacatcatctccgtagatgattggtacgcccgtgatgggatctttccagtaaaaggtctcaatgaaataaacgttgtgaagatccatcgggctccaaccagagaatatcttgagacgttcaagcacaaaattgtatcctgctgggtctgttgttggcaatactagcagtttattgtacaatgatgtaaagacatgcatcatttggtgctcttccatcaaacagtagtgatagcatatcagatactgataagcagttggatctctcataatcatacttagccatctgtgaatatcttcaggaactggtaaagattcaaagagttcttcaatagtcttcacatattgataaaagtcaacctctgcattggcctttgtataggggtctaaatcatcagcttgaaactcatccatttcaatggtcatctcgtcacttatcagaaaatttctcaatgagaatcgaccagcgagtgagtttggctgactgtgcaacttgtaaagggacctaacacttcttcgtaacacaagtcgagtgctcattcttgtgatttcatatttccttgtccttccgcatccaggaggaatgatagtatctgttaacctcgttcttcttcttctagtatcaactaaagttgcaagagctgaggactgcagaattcagtaaattaggggtatgaccagattgattccaggacactatctactatcacgcccaaaccaggaactaagttgatgaaaatacactataagaaaaaaaaaatctaaaacagaaaactgagaatggaagatttcatatcaacaagaatatgccacaaagaaattaaaacttagtgaccgcattagtatcttactgaaaacacaagaacgatcataggcgaaaagaacaatatatgcagtagatgcacggatcataggcgaaaagaacaatatatgcagtagatgcacggtgatattattgaggagcaggcagataaaaactacaccctccatcccaaaatataacttttaaccttcaaaatttgtcccaaaataacaacttcacaagcattcctttcccaaccaatgacaaccctacatcattcaatttttccaccttcctccacttctcatccaaccccattaaattatacctactttcttaatgactgtatccaaccgtaaaaatccttatatgctgggacagaggtagtaataacttaactctaaagcttaacagcagcaagtaatcgcttcatttttgttggttgttcagtcacaaggcaggatagatacacaaaagtttcctaagttcagcaaaaaacagtaggacaattacagaggccgtcacgatccaatagtgtcaattgcatgcaaaacataactacaatccactattaacttatgatttagtacgcgcgtacaagaaaagatattctgctgaacagctagctgtacaagaacttgtgcgtgcatgtacacagtattatctgatgatctacaccctgaatttcataattcatatacttccatatttcaacattgttgaatgttaaagggaatcaaaccttatgatccttgcgaagcgatgattttgacatgcttgctctaggattttgattggagcagccaggtcgctttctttttctacctgaacgctgtttacaagagaactggttaaaatcatatatctaaccagacttggtagcaatgtcgagaatcaatataacaatcaaacatttcattcaacctaggaaacaaggttgaattgggaattaatgtattctaaaaacaagggaatacatggcactattaaacaagaaacttttgattcgacaattgtttcaactcttcttaaccacactatgacttcaggggcaattataggcagcaacccagcaaaaggctgaatcttttagaccaaacaagtatggtcagtagtttgcatctacgaggcctgacttaagagaaaccatgtccggtgatacaaccccaaatacacatccagacaaaagtttcctataaacagtccgataacactgaaagctgctcatatatctagcttcaggatttcttaccaaaatatcgcactagtcataatatcggcggaaatttcctcatattttcgcagtaaaaaaaaattgtgaatgtacacaaactgacaaacatgtggtccagattctgattttcaacattataaaagattacaaggagtcaagtctggtgatccgcatgaaggtgacaattgtgattacattcttttttatggatttcaattggacaacacgttcaccttcatcttatatccaaaagttactccacaacaaaacgtgttaaaattaattcatattagcagacttaaacccaattgcagggaagtaaaaataaagatcaagcattttactaggaaacaaggaaatatgggatgtatggagtttttcaacaactgattggcaagaacacaaaactggtgcttctgcaatttgtctactcttgccaattatgcttcgggccttcatagccaattccgggtgccaaccagccaaagtttgaatcttttcgaccaaacaatagtgcgtgataagtgattttgcatgtaagtggtcctttatttagtgaaactgagcccagcaaagcaatctctattccttagtacacatctggatgaaacattcaatgaaaatgaaagctcatacagtaggaatgaaatcaccaataaatcccccacatttttactgtcgattaaaatgcatcacattaaacagaaaatcagattaacacgagcaggagcaactaagtctcaacaattccaacagtcccagtgtcaaattccatagaagatagaaagaagacctacaagtagttaggaagtatttcgcaatgcagaaagccaaatttgcccccctaatttgcccagtcgattttgattctattctaagatgtcacaacatttcaaccaagatttcttcactcaagtacagcaaaaatcagccaagactttcacactggtaaatacaaataaagaatgccaagatcctagttccacattctaatacacaagctgattccctaaaaaaaaaacttttttttactgtaaagcaaacagaagaactccccatgttcctaacacaaaagatggcacaagagttaacttatgatttactgtgcacacaagaaatattgctctgaacagctagctgtacaaaagcttgtgaatatatatatatatcatgtgatctatcatcctgacatttcataattcatacacttccattttcaacattattgaaggttaaaagcaatcaaaccttttgatcctcatgaggcggtgattttgaggtgcttgctctagtattttgattggagcggtccagatgcttttgttttctatcgaaaatctgtttacgagagaaccggttaaagccacacatcttaccagacttggcagtaaccgcagagaattgatataaagatttaataattcagactagcaaacaagttagatagggaatacatggtattgtaaaaaaaggggaatatatgcgacttttaaacaacagactagaatgcccagaccagccaagaatgataagtaaacgtctccttacctttctcctgtcatacgcaagaatgctacttgggattgggagtaacttctcctcatgtggatttgaactattaatagaactaggagggagtgggtagatgatgtcatagtgagactctatgcgcagcaaggtcacgcaaggagcgccgcggacaatgtagtgcgtactttcgcaagttccatcatgaacgttctccacttggacggtcaccctgagagcttctgcacaagcttttactgcagcagaggttgcgtacacacgaggagcaattacgtgcttcgagcaccactgcatgcatccagagcaacaggtcagtcaggtgaaatgagtgtgaagaatatatagttgcattcagtttgtaacaggtcaggtctctaagggaagtgatgctgatactaacatcttccagattctgattttctccacaattagttgcacaccattcataattccatatgcgcgtgcacatccaggtagctgctactaatctgaggaaagcaaaaactgatacagaagaaagcatgtcagaatcaggaaagtggatcagatggaaggaatgaaggctcaaggtgttttctcactgtcatccgttgtatcataactgctgaagaactcaagaatcttccccctgtcatgagatgaaaaaaggcgcatgttcagtcagtgagatgggatagtacatttagaaacaacactcttccggaattgcagaaaaccaaacatttcaaaacctgattattgatattgggtgctcctgcatgcgcttccatccctttattttctctatcagcctctcaaatgcctgcaagaatcaatgatacaataaatcataacataccgctggcatctagcacccagagagtttaaccagcgtgttacaatggcgcttacagaatgatgatcatcaataaaacatgactagcataacttgtcggacaagcttccatagttaaacatcaagtatggagataatcattagaaagaacatttgatgagatagtagtaaggaagacatttgtgatttaggatcaagatggccaaaccatgaagcagcatgtgtgcagcatttcagtcttgaacataagacacctataatatttgttcttccccattatattttatcactattaatgtccaactgcaaaatttcttgcaaggttgaatattgttcaatcaggaagttaacttcacaaatttataattagaattaatgtcaacagggtaaaagactgcgatgtcatgccactattgtgaaacaatggtgtgtatctcctgcaaatgataaaacaaaggaagtaaaatgatggatacagattggtttgtacaatacaaatttagattagaggaatcatccattacaagcatgtttatgtcagaaaaaccaatataggggaaaaagcaaatagggaagacaagagattactttgtgtttctgggaaaattcagaggcccattgaagattttcagctttggtagccaatgctctaacagcagcaagaaggcggtcttcctcacgtgtgcctatactatcaacaacttgctcctgtcatacattgtcaaaactaagagagttataataacattgaacatacatcctatgctagggaatagggaggtggacacttaccaggtaggaaaatatgaaactcctatagaaacattcctcatctctatgtactggcctaaattctgaatagtgatggctgagatactttaaacgcaaaccaacttccggttgctggaaagaattatcaatgttcctgaaataatgatttgcagcttctcccatgggaattttctgcatcccacacacaaatacacaaataagggaactcaactaaaaatggtatatgcataagaaaacaacataactagaataaaatatattttatgttttatatgctccacttttctggtgtttatattctctgaaaaatgcttagaaataattagaattatcacttcgtttttattgattggttgttgtaaagtcataaaagacggaatatatgcacaagatttcctaaattcagtagcaggcctattccagaagccatcacaatccaatcctttaattgcttgcaaaacataaccagatttaacttatgatttagtatgcatacaaaagagatattctgttgtacatgaacaattgaatgtacagtgtcatgtgatctatcatcctgacatttgataaatggtgcacttccgttttcaacattatctaaggttaaaggaatcaaaccttgtgatacacatgagcaggcagttttgatgtgcttgccccgcaattatgaaacgggtagttcactggttctccttttctatctgaaagctgtttacaagagaacaggttagcatcatatattctcaccagacttggcagcaatctcagagaattagtacaaagaataaacactacagactaggaaacaagggaatatatggaacatttaaaaaacaggctagcaagattggaaaactagtgctttgacaattttgtcaactcttttccaatcatgctatgggtattctgagaaaattctaggcagcaacccagcaagacacggaatcttttagaccaaacattagagtatgctcagtgagtttgcatatacaaggcctatgatttggagaaatcatgtccagttatgaatcccaaatacacaccaagacaatttttttcatatatcactgtcctaagactgaaagcacatacatgcagctgcaagatttcttaccaaattatcacattagtaataatatggtgtgacagttcctcatattttcgccgtaaaggaacttgtgaatatacactagatcatgaggtctaggattctgaccctaattttatatgcccattttcaacatcatcacaggttaaaaggagtcgaatctggtgatcctcataaagtgaggataggtacttttttttgtggaattttgattggacaatgcgttcaccttgctttcatgttcaaaagctattccacaacaagatcgattacaggatagtaatatcaggatcaaacatttcacactaagaaacaaggaataggggatacatgaaacttttcaattacagactagaaatgtcacaaaactggtgcttccacaattttcctactattgctgattacacttcgagccttcatagccaattttgggtagcaaccagccaaaggttgaatattttagacccaacggtagagtacaccaagtgatttcgcatgtaagttggtcaattatgtagagaaattgaacacggtaatgcaatgccaattccaaatacacatccggatgaaccattcaatgacaatgaaagctcataaattcagctttaggatttctgagcaaaaaatcacactagacatgacatcacccaataagtcccccacaattttacagtgtgattaaaagtgcatcacgttaaacatcaaattacattagatcaagcaggggcaactaataagtgtcgacaatttcgatagaagatagcaagaagacctaatagtagtcagaaagagtttattcccaatactggcaatacagaaagctgaattgccccccaacatttgcccagttgattcttttttttttctttcttttttttttggtcataaggcctagttgatttcaactctgttataggatgccacatcatttgaacccagagttctccgccccaggtacagtaaaatcaagaaatcaaagattgccaagatcctagctccacattgcaacacaagaatacaagatggcacaagaaccgcatctaaggaacaggatagcacgttcgcaacggtgaaagatgatcccaagatttcacacgaacgacaaaaatgcccagccccagaccaatcaagaatgacaagtaaacttctccttaccttctcctcggcgtcgccatgatacgcacgaatgctactcctgagaagcttcactttgggggaatcagatgtcctctcctccttccttcgtgcctgcaagaacccaagaaatgctcaagaacaaatccaaaatactccaaggtacccaacacaaacgccatgacagcacaaatgcaagatgggaaccattacctgttcccgatcatcagagactgtaaaagatccttctccgatctttctctttcctttgcggtccaccaatgcagcggcggcgctcaaaccgtcgatgccgcggcctccgcctccgggctgctcacgggcccgcccctgggtgaagcgctcggtgggcgagcgaggaggcgagcgcggcggccgcgccggcccagagacaacggcgccgccctgggctgcggtggcgcgggagctggactcctgggagtgggactcgcgtcgcccgcgcccggatcgggattcggtgatattcccggtgatattacattgagtcactgacattccgagaatgtcacggagaatgtcaccgaatcctagtcccccgcgcccatggatcggtttcgtcttttggtgggttcgacgcggacgccatccacgcggacgggaaaaacttgtgggaagggcggaggggctgatttgctagatcccaattatgagagggggcggaccagaaatgtgtggaggttgtttcttttaattcttgaaaggcaagaggcttatctataaaggtgaaagtagttctgattcgtgagatggagtagctgataggggtagggacctggcatttttccagtttaccccttttaattctaaaaaaaagtttgccccttttaggggaatttaactatttatcactattaggtttaggggctgtttggacagtactaaaaattattttttaagtccctgtcacaaaattattttttaagtccctgtcacattatatgtttgaacactaattagaagtaataaatatagactattagcaaaactcattccatgattagcctggactaattcccgagacgaatttattgagcctaattaatccatgattagcctatatgatgctaagtaaatatgtgctaattatgaattaattaggcttaaaaaattatcacgtgaattagctcttatttatataattagttttgtaagtagtctatagttaatattctaaattaaagtccaaacatccgatgtgacatggacttgaagtttagtccctagatccaaacaccaccttagcaaataaccaaatagctctcttagatttggacttacaagagaggtgaattattaactatttgccacttttgatgacgtggcatgctaacatgggaaataaaattctcacccctttctatcttttgttatctccttcgtcctccatcgctgtatcgccatggccgacacgcacgctcatcttcctccttatgcccgcacagtcgattgcactaagctgtccacgtagctacctctagcatgcccaaggctcacgactgcttgcaaaaaggcaagaccacgccctacgccctatgccgcagttgcccccgtcaaacgcggctggcctcctaaggtacgctccatcactcttatcgagctagcctcctctaagagcaagaaggccaagtggacacttcccgaagctctccagtggcgatgacaagcttgttttcaccttgtctccctactttgaggccgagtgcaacaacagccagccaaactaaatcaccagattcaaaaggaacatgtttctttcctttgcttccagcaagtttacacctagtattcatgtgctctatgttctccttagtggtctcatgcagttttaacatcagttcatcacattgttttgcatcaaagttcaccctctctgaagttgggaggggcaaaagatcaataggagcacggggtagaaggccataaataatctcaaaatggcacttcttagtagtagaatgttgcgaacgattataagcaaactcaacatgagacaaacattcttcccacattttaatattctttttcaaaatagctctaagcattgtagataaaattctattcacaaccttagtttgtccatcagtttggggatgacaagtagtagaaaataaaagtttcgtccccaacttagcccacaaggttctccaaaaatgactaaggatttttgcatggtgtttggcactatggtgttcacttgcatggagtgccaaacaccatagtttctgatcggtaacctatagtttctaatttttgcatggtgtttggcactatagtttccaaaaatgtcagaaactatggtgtttggcactccatgcaagcgaacaatctcacgaaagaacaaatcagcaatgaaattttcttttcccttcttatgtttgatgacatatggaaaagattcaataaattcaacccatttagcatgcctacggttaagttttgcttgacttcgaatgtgtttcaaagactcatgatcaaagtgtataacaaattctttgggccataaataatgctgccatgtttccaaaattcgtactagagcaaacaattccttatcataaatagaataattcaaactaggcccactcaatttctcgctgaaatatgctacaggtttgccttcttgtaacaacacaccacccaatccaatctcactagcattacattcaagctcaaaagttttattgaaatcaggaagttggagtaatggtgcgtatgttaacttatctttcaaagtctcgaatgcattcctttgtgctgcagcccaagtgaatatcacattcctcttggtaagctcatgtagtggggctgcaatggtgctaaaatacttcacaaagtggcggtagaacccagcaagtcatagaaagcttctcacttgtgtgatcgttgttggaaccagccaactatgtatggcttcaaccttggcttgatccacttcaatttcctgcggagtcacaacatagccaagaaaagagacttgatctgtgcaaaatatgcacttctcaaggttaccaaataaaggtgcatcacgtagagcataaaaaacaacacgcaaattatcatgatgatcctctattgatctgctatatatgagaatgtcatcaaaatataccatcacaaatctgccaatgaaagcacgtaaaacttcattcattaatctcatgaaagtactgggcgcattagtgagaccaaagggcatgactaaccactcatataagccgaatttagttttaaaagttgttttccattcatctcctaacttcatgcgaatctggtggtaaccactacgcatatcaattttagaaaacacaagtgaaccacccagttcatcaagcatatcacctagcctagggataggatgacgatatctgattgtgatgttgttaattgctctacaatccacacacatgcgccatgagccatgaactaaaagcatggggacaacacaaggactaagagactcacgcgcataccccttgtcgagtaattcttgcacttgatgttgtatctcctttgtttcctttgggttggtcctgtatggcacacagtttggcaaagaggccccaggaatgaggtcaatctggtgctcaatccctcgaattggtggcagccccggtggaacctcctttgggaaaacatcggcgtattcctgcaaaaggttagtgaccggaggaggcaaagaaatagaagtatcctcgagtgaaaataaagtttctttgcaaaccgaagcattgcaaatagaagtgtcaggatcacttcgtccaaatctgactttgttgcaatgaaacaagatcccttcagcttaatctcatttttattattttgaacagagttggtgcatttcttcttatgcttctcaagttcattagccacaatatgatgctcactcctagtatgctcctgaagtttttgcttgctagctctagcaagttcatcctttaaaataactttaggagacataggatgtaacacaagcttttttccattatgcacaaagaagtactgattggaattgccaaagtataaagaatctttatcaaactgccatggcctacctaataacatagaacatgcttgcataggcacaacatcacagttgattgaatcatgataagaaccaatgacaaaatgtactcttaccaattgtgttacctttaccttgccgctgctattaaaccattgaatgtagtagggctgcgggtgtggttgtgtgctcaatgcaagtttctccaccatttcaacactagccaaattattgcagcttcctccatctatgatcacgcggcaagagcgtttgttgatcacacacttggtttgaaacaaggtgtggcgttgattttcttcagccctttccatttgtgcacttagcactcgctgcaccacgaggctctcatagtgctctgcagcttcggccccaatgtgttcttcatcttggtggggcgtgtcaccttcccctgcattgttagttgcaagcaaagcataggtttcttcatctaaatcaccagcggaggagtacccaccatcagctctcacgatcattacacgagtgcttgggcagtccttgcacatgtgaccaaagcccttgtagtgtaggcactgaatatcgcttgtccttcctgatgatgccactaatgatgaactcttggaaggtgtagcagcaacccctcttgctggttcactcaggcatggtgtagagtttgtcgtggaggaacgtagcttgttgcttgaggacgatggtgctgctgctcgagttgacggtgcaacagcgttggaaggtgtccaagagctagtacgacctgcagaaatgttagtcctgaagctagctcttcgtccctgcacttccctttcagctttacaagcaagatgaaacaaacggttaattgaattatattctttgtaggctagaatgttctaaatttctcgatttagcccacccatgaatctagccatatgttggtatttcttaacgacattactaggcaatggcgcagaaatactcctgttatattatggttacagagttcatccgcaagcgcatggatataccattgtagcatttcacctgagagtattccaaggatatcgtatttatttaatcccgtaggaagatcatagtagagagataataatcatagtctaagcaggggttaagataatcaaagggtagagtgacacacaagccaggaactactcattctcatactaaattacctaagctaagtggaaagaaaatagaaagagaatctattcctatacttctagtatacatagtatacatacattctagttatctgattaactagctaataccctctatccgatgtcctcctagtacttcaagaagccacccctgactgccgagttccttacgacagcccgtcatgaccatacaaccggggctaaatacagaggagtaccctcccctggaaattaacttaggactatatacacgcgtggaggaatacacgtactgagctgtcaccatcagcggtccacctctcatccgcagcatataaccccaaataatgatatcccgtaatctagacaccactcctaaactaccagatactactctaatatcatcgtcatgacatagagcaattgcataagcaaacactatacttgtacctatgcatctcccaaataagctagcagtacaatcagtataacatgaatataaagtaaagttggcattcatatactcggaaagtatttcaataccagaaatgtataaagaagagtattctaataaatgtacaaagcttacaaaagaggaaaggaaagctactagagccatacccgaaggcttccggactccgatttctactctattcctgctctactagcttaagaacactaaactaaacttgagagaatatgagagagctttgcttgaggtgtgtgagtgaagtgagaagaggagctccttttataggcatgtaatgacgattatgacggttggaaaggtcagtaataccctccaactgtcattggggaccaatcccagccatccatcaaaaccctacatccattggtgccacgggaggttcggccgaaccatgggctggaccgacctaacccaaactcggcaggtggcctcctctattgcttctctgcgaagacttgtgaatttttgcccaattcatcgtgtcaattctgagttcttggcccattcatacataagtctgattctcgacatcgttcgattgatttattgtctgatttgatgtcgattctcctccactttatggttattctctgcaaaaggttagtaaacctaatactagtggaatattattattctaacataaatatgcattgcaagtataactatttctcctctattttggtaatatttacggtcgaaactgatcgctaacgaccgtcaacaccataccagcatcatcattttccaccaaaccacaacgaagcattcctgtttgcaaagcttgataatactcttctacatatttgattccatgtctaagttgttgcaatttatgcagcaaatcacatgcatgatatgaaggaacaaatctagctcgcatgactcttttcattgcatcgcaggtttgtggagtgttatttggattggaacgaacaaattcactccaccaaatggatgcaaaatcagtgaacttactagtagcagccctaacacatttattctcaggaaaatcataacaagcaaatttctgatcaatggctaactcccaagtaagatatgcatcagggtcatattttccatcaaagcaaggaatggtaaacttgatcttgcctaaagaatcgtcattatcatgtacctcctgccgtggtggagcgcccattccatggcgctgttggcgctgttgtcgttgtggacgaccaagtacctcctcatcaagctcggtgtcagcagcgtagtccacttcttcccttgctgcgacgctgctattagcttcatggccaatgtggttgcgcctagccggtccatcatgaccatcttggctcattctcttcaacgtattcaagatacctgcaagagaagtgttcacagccacaaggggtgtctccaatgaggaaagcttggagttggtgtcaatttgagtagcctccaattgaccaaggcgatcattggcgaccctaacatcctcatcaaggccttcagcatgctccctcacttggtgctcaaaatgttgtatgatgcccctcgtacgtggtgaatgttgaggatgctcccctgatcctcctgtcatggttaatactccctccattctaaaatataaggcacaaccacccttaacccaaagaccaaaaataattattatcatcttgtagtttgaatcatcctaataaatataatgcatgcatccaataggattagataacatgagagtggaggatttaaaaaataataatttaatggagaagatgtcatagttaattgcatgcttgcatgcatgccttatattatggaacatctaaggaaagtggttgtgccttatattatggaatggagggagtaggaagcaacaattcacaagagatatgtcctatcaactattggagctaggtgttatccatctccatttctaccaaacttgtgcaaacgagttcttacatgttcttactttgctatgtaaaaggcgttggcaactagcaagaacaacaacaatggttagtagtaccagagccgacaacaagcacgatcctgtgatggtagtagataaaaaattgtggagctataggtgactgcaagtaatgtcaaggtacagctagaaccacattaatcaagcaagttgaataatcgctcaatgatggtattgtgttggtcctaggtaaaaccctgttagagagacgaacctactcacaagtgtagccactcaaaattgcaccaaaagaacacaaggaaaataacagcaacaacttcttctctatttttttcttttcttcttctccttgtttttcacttctgattttttttctttcctttttcttcttcctttttttaaactagttcaaagctgaaaatttttcccaatgaatttcgaaattactcaaaacagcaggaacaggaacaacttcttctcttttcattcagccaacatgtcaacacaatggagtaatgatgggctggttggagttacttggttcagccaacaagtcaaaagtgagggcacttaaatgctttctttggaagggctaattcactttacaaagttgcaaaagggttggctattggtggaggtagcaataaatgcatttgggggtggctgatgtagtgatgagggtgctgttggttgtggtggacgaaaatttggtgcggatgaaggtggattcgtggtgaatatggtgatgatggtggcagcgggatgaagatgaaagaggtgatggtggaagtgtttgtggtgacgaaattgtcaacagaacatgaaactctaaaggactaaactaccagaaccagtaactcaaccaatcgatgcaaccgaaaactcagcaagcaaaaactaagtagaacaacaaaggctcaacttgttttggtgattttggatctgacctattttgaggtttttttatgggctgtaggtaaaaacaaaggattgaaaaatctctcaccgagcaacttgagctctgataccacttgatgcagcaacgggggttctcgatctttcgatgagacgaggataaacttcgatttggaggaggacacgacgttggtggtccgactacaactaccacgggggtgctacgccttagcaaccggtgcaccgactccacgttgttgttgttcttgccgtgccaagaacaaccttgaacctacaagcaatcgaagaacaagcaagaacaagttgacaaggaaatagctcacggcgcttgtcaaatgatgaaattgaaacaaacgaaaatggggttctgaatacaagtattcgggtttactagctggtacacgcgagtacaaggacgtagctgaagctaaacttacatctaaacaaaactcaaaatacaaaatggtggctgctaggggtttatataggtggaggaatgactaggagaggaggtgggagcaaaccctagtttttgtggacccctaatgggctgtaaagatacaaggcccaagcccaagtttctgatgtgaaaactattttcgtcattctgagcagcttgggtcgaatctgatggtgagaccacacatagctgaaagtagacgacaagatctttccaacaagtactcatttgccccaattggccatcgaagtgaagagcattgacttcatcaaatcagcgctgctagtgttgtttgtgatctagatcttctcccatattcctaacaacaagtagatcataacaaccacttagtagcacccaattctgagaagaacttatatgagtagctaggaatgactttacctgataattacgttcacaagctcgagctctagtcattggtccttgctgtgcttaggcatggatgtatcgttggaagggatgtcctcatcagttctttttgacatcttcacaatctagcaatataacaagtagcaaactaggaatcacaaacaaaattttcaattcaatatctctgatttcttgaaaacttgaactattaataacaactagacttgacaattgaaattgattttaaatgacaaattagaaattttatatacctcacttcctcaaatcctcaattgctgagttcctgccttgccccttgctgctgccggcagctgccctttgcccccttgcccccttccctgcttgttgccgcgccgcgccgccgcgtcccctcgtcgacccacccccttgttgccgctcggggcccccaggccccagcggccagcggccggcgcgccgcgtgccctaactgctgcagtgtcgccggtcgccgcaacttcgcctggaaggctggaactggaagccgtcggccgtcgcacgcgcactcgcgcttgtatgccgccgccactccgtgagtctccgcctctcttcggtaggaggaaggagattagggttgggtgggattgttggggatattatgggacttctaagcctttagggccttctaaaaatctcagacaaagtctatctcagccccttcttaggattaggtattatgggggctctaatggtttgttagggggtagtggggtcttcagacccccccccctccgcccccacgctgtctccgccactgtctggaggtagtgcttcgacgtgctgcgagggtccagcgcatacagccgccggccgtcgacgggcaccatgatgcccagcatcagcgtcgttgttgggcgagggccagtggccataaacgacgtccctgtgtcgtacatgaagacgggagaatcctcatggaaggcatgcgtggcgatgacgatcttgctgccgaccgcgaccatggccaggaaggagcggtccaccggcacctctatgtggacggcgactggctaagaaaggtggtggaacatggctacgccagtgccggcgccggaatcggtgaactcgtcgatgtccagcttgtggatgacgtatcccatgtcccaatcaagcaccatgtagaggtgtttatcatcgtccctccaccgcgaccttttactggacgtggcgatgttgctgctgtgttgatcccacaacgatcgcttggagctcaacatcgtatcttcctctgcatgccctatattttttagaacatatcaacttgcattgatccggcttttgggagaaagccgaaaggactacaggaacagagtcttacacaaaacgaaaagaaaaacacgaacatactacattattgctgtgaggaaaaagtacgaattatcccccccaaactatcgtggtcatccgaattacccccctgaatcacaaaaccggacattcttcacccctaactatgcaaaccggacgaattacccccctcaacccaatccacggtggttttggtctacgtggcgtacgcgtggcagtccagtcagcaatttatttatttaaaaaatatgggacccacttgtcatactcctatttcactttttttctctctcttccctctctctcactcttcctctctctctcttctctcactctgtctcacgcgcacagcggcaggcggggggcggcgagcggcggcggcggcgggagctcgcgctgctcgagcgaggctaggcggcgacggcggaggaggcgagcggcgggaaggacggaggcgagcgttgggggatgaggcggcaagcggcggcgagggagagggagctcgcgctgctcgagcgaagcgaggcggcggcgggcatcgtccagcgcgcgctccgtcgccgcggcttcctcgcgcgcccgcttccgcgccgcgtccgccttctccagcgcgcgcctcacctcttcccgctgctcctcctcctcccctcctgctgccgcggccacggcgccgccgtcggatgccgcgacgacgacgacggcggggccgatgaagagctgcagcttcgtcgtcgtcatcgtcgtcgcgtgttgctcgtgggaggaggagccggtggtcgtggagttggacgagaacgcggtggccaacgacgccgtggtggacgccgggaggagctgcagctcaggcggcagcggcggatgatgatgatgatgccgcagcgccgcgggacggatgaccggcagcgtcgtcaccacgggcacgacctcgccgcgcacccgtccagagttacacgcatcctggtgctctatgaagctctccaccctgcaaccacacgcacacaaccacccccaaaccaaaccaccgccattagcgcacactaaccataccacttaacctccatctcatcaccaaacacaacaaaaatacggcaatcgatccgatcgactgatcgatcatctgtacatgtagatcgatcgaaagcaacgcatcgatcgaacacgacacacactgaccgatcacctcgtcccctctccgccgcctcgcctcctccgctgccgcctcgcctcgctcgagcagtgcgagctcccaccgccgccttgcctcgccgccgccgctgcaccccgccgcagctcgccgcctcatccctcgctggcgctcgccgccccccgcctgccgctgtgtacatgagacggagagggagaggagagagagagaggaagagtgagagagagaagagagagaaaggggaaaagtgcaataagagtacgacagatggggcccaactattttttaataaataaattgctgactggattgccacgcgtacgccacgtagaccaaaaccaccgctgattgggtcgaggagggtaattcatccagtttgcatagttgggggtgaagaatgtccggttttgtggttaggggggtaattcggactaccgcgatagttgggagggggggtaattcgtacttttctcttgctaggaacatccagctttctagacacagcacactacaggaacatcatccaaatagaacccttctggagttggaccaaactagatacaagcaaaacaacttagatagacgatggtagatgttgtggtttcagttgaaccaacttccctagcacagcttcatgccacccacccaagattgctctttcttcctctcttaacagcacactccacttctgagagaaagacagagctttgtaagccacctgcaagtgtgatttcaccaagatattgttaaaaacccaatcattcctagttagccaaatagcccaacagaagctagccatcatcagcaactaaaccctagattccttgtcacacctcactagcccaaaacaatcccacaaagatcctggtaaggaattcaagtttatagccaccttaagcacacaccaggaaaaaacagctaaagagcaacgaaagatagcatggttagtatttttagtttgtaaacagagtttacagaactcatttcctccttccaattccttttcaccaattgctcagcacaggggagtctccctctcccaactagatacaaaaaaatgttttatatttagaggaattctacctttccaaactgcccccatttaataccccaaaagttaaaattttgtacattgattttgtggtgaacacctctttttcagtatgaggccaacagacattgtctttatcagtccccatctgagcttccccaattaactctacaagttccccaacctctaaatttcttctaaactccaagctccattctccttgtaccaccatatccttgacagtagcattttgatcatgaataatttcaaagagatcaggaaatctaactttcaaaggtacattataacaccaaacatcattccaaaaactcacatctcttccattgtgcacttcctttgtgactagcctggaaagccactctttgcatttcaacaaacccatccaaaatttgagagccaccactcccattccttgtgaaaaaattacaatttctctaatatttccttctcagtacctccaagcaaacatcaggtgctccactttccaattttcataacccatttactgagtaagtaaagattcattgctctagtatccaaaaagcccattgccccaaactctttgggcctgcacagagtatcccatcttatcatatgatatttatttttttccccaaccccgccagtaaaagttccccctaattgtgtccattttttggtgaaacccctcaagcaaaaggtagaaacccatagcatacatgggtgcactagacaaacatgagttaatcttgatctccctgccaccataagtcatgtaaccactcttccaagactaaagtctcttctcaactttctgaaagattggagatatgtctctcatcccaattctgtcaaccctgtcacgcccggaaaaataccttttccagaacgctagtgtattaatccccgtcccaggaaaagccggggtacaccacacaaacatgatataaaagacacatcattattatatcgataatatttacattattacaaaggcacttcaggcctgacaaaaaaaataaacagcagcggactagcgggcctacggctccatattcataggcgctcaactggggaataagccaggactccacctaatacttcttctccaaagctccacttactgaggggggggaggtagagcaagaatgagcacaaccacagtactcagcaagccacactggcagatgcatgattaatgcaagggggtacaaggggaaatagtataggggttaagctttgcagaaaacagcatttaaaagtcacttagttgcccaaagctattttgtaaacacgatcctagagctacacaatattattaatcaaggccgtggacccacacgaacctgccttaacccaaggcctacgataattcagaccgaactggcaacccgacctgagtcccagctcgtcccaagccaacccaggccaacctttccatattttagttgttaagcaaattttaagaattaaaccactaacttgggtacattgctaggcttgcccatatccgagggcacggctattcgaatagattttactctgatcagaggtgtacatctttacccacaagacacatctttactccgcattccatggccttggaacccgtcgtaaacatgtgacataacccttcacccatcctagctgtgaacaaaagtaccgacccaaccctgcctacggccgttatcccggacagacaggccaggattgagcccctagcaacaggatctagaccgggtgcgccacacacataggggtgagaccacccgcgtactagtccagtgccatggcatctcgactaacgggcaacgacccgtgtagccttcatttgcctagacatctcgattaccaagccgtagctcgcgtagccttcatttgcctcagagatatccatcgtcgtaacgacttcatctatctctatttgtgtccttttgttcaggactagactgagcaccgagttaagccttacccattagacatgtggttagtacggtagtgctttgcaacagaggcccgaagaccggtccttatggtggtcgaggtgctcctagcaaaaccatgcacctcgagcccagcctaaaaccatttgggagtttgaatagagggggaggtgtgtgttcaattccatcacaagccaaccattccataatgtccaaatgatatgagaactcccaaagtctaaagttataaaaccatctagtgtggcctaattaatcagcgaagcatctacctaaattcatactagtggaaccattaatacagtacccactagttggggttttgttttttctagggtaagcgaggtgataataaacaatagtaatgataaagctataacaaggattaataggtattgctaaataaaacagtgataacgcgggaatttaaataaagcaataatgcaataatttaaatcaaaataattttataaactgggattcaatatgctcaaggatgatgcgacttgccttgctcagagagaatggccttccgaaccttcagcgacgaccgcgaaccatgcttcgggaacctttgaaacaacagaagctacgcgaagcacacaagcaaagctacaagcctataaagaagcaataacaatacataaaaggaaagcacagggttctttaggttataacaaacattaagagacttgaacaggtcgattcggggttcgtatgaccaagacatggtcatccgaagtttaatgttgttatatggagatttgcggattattataattaggctttgcaactataaaacatgtgtaagcgctagcctagaaaagataggaaggctgcgccgttgacatgtggaccccacatgtcaacctaaaggaccatggtggaccgggtacatagagacggttcacgggtcgacggaagcggaccccatgtgtcaaccgaggcgagtggccgacaaacggactccactagacaccacgcgggctgcacacgtggaaaccacgcggctaccgagcgggcacactaacacgaacactacacggtcaccacccgcgcacgcgaacaactgccgacaccgatgcacgggtaccggggccgacaaccgcacaacgggcacggtggcaacaccgaaaggacaagggcggacagcgaaggagggatccttaccaccatgcgacgtggcatgggaacgacgacgacgaacgggcgcggcggagacggctcggggacgatggaggagaacggcgagggaacgacttcggcggcgatccttggatgaagacgagacacgaccggcatagggcttgacgacgcggagccgaggacgaggatgacaacggggctgcagcagctcacttgacggaacgcggacggcggacgagaacgacttgacggaggacgaacgccacgacgagcgcgaccgggaacgacgagaggacgacgacgaagaccggcggggttcggatggagaggaggcgaggccgaggacgaccttcccactgcgatgccgaaggtggagatggcgacgtcggctggcgcactggcacggtggaaggggctaccaaagtgggtgccgacgtgaccgaaggaggggcagcgtggacgacggcattccggcgaatccgagggcaagccggggtggaggtcgatgcggcgacgtcgtgggaggagacggcgacgtcagctggcgctctggcgacgaacagcagccggccggagacggtgtagtggcggcaatgccactggacgccggcgggaacgcgcctccggtgctctctccgctaaacgggggacagcccgggggagaggaggcggctaagatgccgcgggtggcgacggcacggacggccggcgcacaggcacaacggtagaggcggctggaagtggccggcggtgcaggagagagatgagggtgatggggagaggtggtgcggccacggggagacgtgggaggaggctaaaacgagagaacggaggaaggggatcccattttatagcggaggggagctagacgggcacaggagagggcggaacggcgctgagaatggcggccggcggccatggaaggtggccggggatggcgcggctgttacgggcgactgagggcatgaattaagggggaaattagggggaatgagagaggaaggaaaggggattcattccccctaatcaatttggaaagagccggcttgaatggggcgaatttgagggaggaacggcgctagggttcacgggagagagaggaggagctgggcgggaggaggacgacgaccgggtgggacccaccggtccgcgcggtcagcgcgcgtgcggcgcgtgtgcgcgggagggctgcagctcggcttgggccagggcaggtcaaggcgggaggaggataggagggagtgggccgggaaggagaggaggagggagtgggccggggaggagaggaggcccgagagaggagggacaagggaggagagaaagactttgggctgaactcggcccaaaggaggaaggaggattatttttagctttcttttaaatataataaactttcttaattgttgttgttgcttaataattatttccggtgctctgaaaattcaagtaaaatttgagtgctctttttagaccaaagagaatttaacaaaaattctccgggccacattcgaatttttcttgcacgtattttagtgtttgccaatttcttttcgaattttaattaattctattattccttttagaaaatgatttttatttcgggatgaatttatcaggacgtgacaaacccccataggcaaactcaagtatgtgaaaggcatcataccaatcttacagttcaacatattagcaattcttaatccctcattatcctccacccctatgacatatacatcacttttctgataattaatcttcatccctaatatctcttcaaagcagaataataacttaagggcaaatatgttctcatcggaattcttaagggcaaatgtgtattgaaggtgagtcaaacccccatccactaagtttggaaccagaccttcaaggactcccctttgtttggttttatccaaaatggcagccaaggcgtcacccacaagattgaaaaggataggagacaaggggtctccttgcctcaaacccctgtaaggcgtcaccattgatgttaatacttactctcccaccttctgttatcttttttatccatcccatcattatggagtcaaaattctttttgtccatgacctcatacaaaaaatcccatttcatcctatcataagccttctcaaagtcaattttgaggataatcccagtatcccttttaattttcagctcaagcatcacctcatgtaaaataacacaaccttctaaaatattccttccaggtataaaggcagtttgagaccaactaatcactttgtttgccacttcagtcatcctaaaattcatagcctttgtaagaattttaagaatcacattttttagactgatgggtctatactgtttgattgtgtttgcatccctgatttttggcaaaagagaaatcaccccataattgatcctatctatgtccagctcatccatgtgtaagtcatctgacatctctttaactaaaacccttatatgaggccacacttgtttataaaaacccatagggaatccatcaaggccaggagttgtattgtttttcatagtcttcatcacattgtccacttaatctaaagagaagggtctaaccatccaaactttttcctccccagtcaatctcagcttatcttgccagatttcaggacttagatgaacttccctacttttttcttttccaaacaaccccttataatatgcatagatgtgctgtttaatttgtgagagctctatgatattaacatcccttcttgcagagagaagatatggcttttcctttttcttgatttgcagccttatggaaaaaggttgtattagcatctccttgtaaaatccaagtttcccctcctcttctctgtcaccagatctgctactgaatgtaaatgttttccagcttcttttccatctcatatctgatttttcattcaatttcaaaaagtccactgtcatctgcttatccagctgtaccaaagcattctccaattccttcttcctcttcttttggacactatttacattagcactccatcccctcagccatctcctcaaaaaccctaaaccctttattgtttcttgcaaacatatcatatcaattctttgttcaaaaattaactccctaagctttctttgtcgccctaatccctctcacattctaaaaaaatctcatgatttactttttttttcctccccttctttttctgctcagatcctatgtattctttagtctttgatttttattggatcactccaccttccctgcagaatcctctccttgcctccttcctctttaaccatcccttcaacatcatcactaatctcaacaaactcagatgctcattgcacttactctgttccgcagcaaacaacatagctttgcttcttctctaacacaaacgactgtcaaatttgtctcaatctcacactcatttctctccaacacaatattacttatattgacaatatcaactaaaacatctctattaactgaattgaaaatggcaaaagagttagacatacctgtgttcaaattgacttcagattttctcaattcagctttcaattgcaccggcacttctatgtccctcaccctcagtccctgtcttataacctgtttagttcccaaaatactttttttttgtgtccagttcctgacccacaatatttatcccacttgttcagacttactaacatcctacctgccctatttgcgtgcgaataaatgaataataattggtggatttcgagcatttgattttggagggttcacggcagcctggttaaccttgagatgactcggatttcagaatcctaatcagtcgcggaattaagatgtgatgtgcttacatgaacatgaacgctggacgggccgtgccgcgaataaacgaataataatcggcgaatttcgggcgtttgattttgtagggttcccggcagcctgattaatttgagatgactcggatttcggaatcctaatcagtcgcagaataaggacgggatgtgcttccatgaacatgaacgctggacgggccgtgccgccgcaagccctctccgcgagaggctcccgcgcgcacgtggtatattaggtcttgtaggctggtttgggctgcatgtcagcgagacggataggccgtatgatagcgttatgagtgagcccgttgatgggagagtatcgggcttctttcatatgtgttattgccccctcttttgaggataattttcatatttcttttgcttgcacatctttttttaaaactgttttgcttgcacatctgagttgtctgagatgcgggtgagcactgtgatattattggggcaccatcataattgtaccttagactattttcgaatcaaggggatgagaacctcaccttccacatagaaaacatattaacgcagtattaattaagtaccgttgagtagtttgagaagcatacgcacaaaagtcgagagtgtgaaagttgtgaaagtatagttccaaataaaacctgaatattgcttataattctttgttgataatttgatatataagtatgatactatgtcttagtacaatgggaaagtattatgtgatacttaactagtatggaagtttttacatagggaaatttaactattcgctactattaggtttgccaattaaaattgacgcggcagccctctctttcctggctgcagcggcggaggagtaggaaagggagccaagtacgggagacggagatggcgtaggtcagtaccgaccagcggattctccaaggaagagcgtggcgagctcagcgcctccagcgatagagttgtcagcagcagcggagccgcccacgtcatcttagggtggctggggagggaggaacgccgcgtcggccgactggagtccgtggttgccatggagcatggcgaggcggaggtcggatttgcggcggcgcttggctcctcctcccatggtgtgctggcgagggaggccgcgttgcgctgctctgtctcgacggcggcgccacccaccaactcgtagctgtagaggcactcgtcgaggactttgaccaccgttggcgcaaacgatgcgagcacggcttcgcacgtccgatccagcgtgtaaatgctcgtccttgaccgcggcgtcacttggctcctcctttacctctgccgcgagccgtcgcaccgccgccgccgctgggaaagagagggttgccgcgtcgatttttaatactgccggaggcagagaggaagggagacttgtgagactgacaagtgcatcccacgtcgctttttacactacattgccacgttggcatcccagatgggcagaagtggtaaaaagataagaagccaccatcttagagaggcaaaaaaaaaaaaagagagcaaatctaaatctaaaagaggtatttggataattgacaaacctaatagtgtcaaatagttaaatttcccttttacataagggtcaacataaaaaaaattacttacctccgttccaaaataattacatttctaaatcgaaaaggctaacgggcgatcgatcgttgccagcgatcgttttttcctcttttagtaagtttatacacctaaagtttacacatctaaagtttatccacctaaagtttgtgaagcgaatgtttataagtcaaaagtttatggcaaaatttgccataggacacacaaaaaacgtgtaattagctgggagacaccgcgaaaacatgacacggctgatggacgctacaaaaaatgtataattggctgtagaacactagttgtattattttattatttctaggtcaaaagaggtgggatattttcctaaatgcccggattgcccttctctttccttcgttttctcctttgctgggaaggcgcgtggtgggcagggttcaatctatcgagaaggggaagattttcgggggtcagcgaaattccgaaatttcggaaatctttcagaaatttcgaacaaattttcaaacaaattttgaattcaaacaacgaaattaaagaaatgtgatctagatcagaagataagcattgagtccatccaatccaaagtagagacaggagaatgagacagtcacacgcaagccgcaaggatgggaggcttgtgtcgtcgttgtcgtcggcgcgccgaagaggcacggagtcactggcggccactccagccatgcgaggcccgcgtcgtcgtcgtcgtcgtcacgccgaagagccggggagcccaccggtggccactccagcctcgcgaggcccgcgcggtttgtgtcgtcgtcgcgccacggagcgccgtcgccggctactccagccacaccgctgccgccggttccgcggccgccgccgccgccgctcgctagcgtcgggaggatggcgacctgctgcctactggggcgagctgttggaggaggacgacgaagcaaagctgcagccagccttcgctaataagtgaggaattcagggattttgaccgtgaaccctcgccccactacgcacgtgaaaacgaaggaaagagaagggggtaatctggtcatttaggaaaatatctcacctcttttgacccagaaataacaaaataatgcgaccagtgttctacagccaattacataatttttgtagtgtccatcagctatgtcacgttttcatggtgtctcccagctaattacatgttttttgcgtgtcctgtagcaaattttgccaaagtttatatacccgattcaaattcaaatttgaattcaaatattttatattttcctcttttagtaagtttatacacctaaagtttacacatataaagtttatccacctaaagtttgtagagcgaatgtttataagtcaaaagcttacatacacgatttaaattcaaatccggattcaaatattttatatataaaatatttctatagataaagtttatgcgtataaagtttatgcgtgtaaagtttacggtataaactctatgcacatgaatgagagtattattttttttattaactttgtgttttttttatttttacgatgaaaggaaagaatagagaggagtatccgctgataatagagacagattagcaacaaacacagtaaccctatttactaacgacactgcatacacacatttcgtacgtacacttgactaaaagtaatattgagacaataaactcagctaattactattattaaacttgattaaaggaaaattggatcccactttggtagaaatactccctccatcccataatataagggattgtgacatattgacctaaaatcccttatattataggacggatggagtattttttttaataaaatttgaatggtaaaaatgtaattattctagaacggaggtagtatattacacaattatttcacgctcgctctctatctaaaccgtcgcgctcgcgcatgtacaaacaatggcaggttgtaactttttttttgatatgggccttgtttagtttcatatgctaaattttattttaagtatgcggacacatatttaaagtattaaacatatactaataataaaataaattatagattttgcatgtaaactgcgagacaaatttattacgcctaattaatccgtcattagtaaatgtttactgtatgtgtatttagatcctaaaaaaatttgtcaaaaaatatcacatcaaatgtttggacacatgcataaagcattaaatgtgaacgaaaaaaacaattacacaatttgcatgtaaattgtgagacgaatcttttgagcatagttgcgctatgatttgacaatgtgatgctacaataaacatattctaatgatggattaattaggcttaataaattcgtctcgcagtttacaggcggaatctgtaatttgttttgttattagtctatgtttaatacttcaaatgtgtatccgtatacttaaaaaaaattagccaaagaactaaacacggcctgtagcaccacattatcaaatcatggcgtaattaggctcaaaagattcgtttcgcaatttatatgcaaactgtgtaattggttttttttcatccacatttaatacttcatgcatatgtctaaatatttgatatgatgaaatttttggatgtttgaagggaactaaacacttccatacgcaggttgtaacttgtgagtgcttgaggaaaacatgagaggaagaaacaaaaagaactactggcgagtagagaaggtcgctcggtggcaggtatttgaggccgtgatgcagacgaattgaagtgacgtggaaccgacgcagcaaccactctatcggtatatccatctcatcactccatcagcatcaaagctcttggcaaaaccagcactcctgcctgtccaaccaccagagaatattcttcctcgtacatccgccacgtcacgtgatcctcccctgtgtcttctagatctatcaacagattgagcaaatggcttacaaattcacatatctcctctcgtggtaaggttttcctcagcattttcgtcgtgccaactggaagattaagacaggctcaacagccctatcatgttcttaaaaaaaaacagccctatcattgcatttgtagcgtggataagcaataatggtgaacattagacatgattaatttagcgaaatgacgaaatgggtagattatttggcgccatctaactagttaccagctatgcatcgacaccgtagatgtgaaaaaacacgcaccaaatgtctagatcgatatcgaccaactcaccaccgaacagtcagaatcaaaagccatctcttaccttctctcctctccctaaagaaaaggccatccttttactagtgtccttgctttttgcgatggcatccatccataatccatttatccaaagtcaatgcgacgccaggaggcgacagacacgagcgcgcatcgacctggcactggcacaccacaggacaggagcccaggaagctacctataccttgctagcttggcgtcttggcgaaacacccccttgttggatcaatctgctgtgctggtggtgagtcagagttaagagttctaaaaaaaaaaagagagtcaaagttaagagatcgaccaagtcgctaaacaaatgcaggataagacgagcacctcagcatgagccgtcgtcctaatttgcaatcacctgcatttcatcttctactactatcagatccaaccaaacaagcaagggcatcagatattcagatcagtatatcgatcaggggcaatggacaatgcgctgatgcatgtgattccacttagtcatgcgagttaaccaaccggccgtgtgcgcaataatggattaaacaagtactagtaacaggagatttgtggcctagttgcctgaatttatgcgtgacgcgtctcccattattggactacttgacgatgatttattgttaagttgacgtgtaaaattattactgtaaactgccttttctgtaatctttatcagtcgatctctgtctctctctccgtcctgccgtacgtggtttcagaaaaaaaggaaggttgttgttgctatgctggatatacaggattagtcatgaaatgaaggggagttgcaagtgttgatcaattagtgtgtcgaaccaaatcaaccatgtcatcagcagttcttgtcttctaaggccagtcacaatgggggtttcactggtgtgtcatgcacatttaataggggtaagactgaataaaaaatgattatttgcatgaaatggggatgagagagaaggaaagagtttcatcctggtgaaactcgtcagcgtcgtttccaagtcctcggtaacagagtgaaacccccgttgaggccgattcgtttcattcaccggatctcttgcgtccgcctccgccgtgcgacctctgcattctcccgcgccgcgccggattttgggtacaaatgatcccagcaacttgtatcaattaaatgctttgcttagtcttggaaacgtcaaagtgaaacccctccactgtggggattgtttcataaaagatttcatttgagagaagatggtataatattttgggtagccgtgcaatgacactagccattgtgactggcctaaagaattttcctcgttaattaatcaaattaattaacccggctgtacttagtcgagtgttagcccaagccattctcagccagctagtcctttttctcctttttttttttcaaaataaatagtgctgtttgtacgtgctatggctgttttgaggaataagctgctattaattcacgtcttttatatgaaatgaactcgtgattctatttccaagagatattgcgttctcgcgcgtgttgatctgacagcagcattgacccctcagtataatgcagtttttttatataaagaatcggatgcaactaccaacaatggacaattggacataatcactaaactaaaggaggatcactcctgctaccacatggacaataaacaaattaaaacggcactgaaataccgaattcagctacacacgaaagaagaaaatatctactctagtagcaacttgcaagctttaattccttctcccttaattaacccttcccctttatatatatatatatatatatatatatatatatatatatatatatatatataaactgaaacttgcaatctcctctgcacatattctcagggttcagcctaaataaaaccgagaaaagaaggtgctcctttgtgctctcgtgatgaatctgtcgtgtccatcacgtatagcaggaataaaccaatcgtcttatcctttaacccgtcgtggaacagaatcacgatttcttctttattggacaaacagaatcgcatacgaagtgacgacgaaaagcggaaccaccagaacgatcgatgcatccgcatgatgtggctgatacgaatgatatcacttgacacactcgaccaacggctagctaggcagcgagcggcgatcgacgagcgcgcgcaagcaacggcacagacgcacgcacgcgttgcgcgggcggatgctgcaggagttcgctgcagattgggcgggcgaagccgtggtaaaagctagtactacccaccagctgttccaaaccatctggacgacaccacttgtcaagttgtattgccacgatggcggctttgaacgattgcacgtacgcgaacgcacaacgtcgactcgggctctgttagttttcacgtaaaaacttttcactatgtgacattgaatgtttagacacatgcatagagtattcaatataaaaaagacataattacatagattgtgtgtaaattgcgagacggattttttaagcctaattgctccatgatttgacaatgtggtgctacagtaaacatttgctaatgatggattaattagacttaataaatttatctcgcagtttacagacggaatctataatttattttattattagtctatatttaatacttcaaatatatgttcatatatctgatgtgacacgtcaaaaattttcacctaacatctgtatgaacacagaacacagcctcggtcaaagagaaaaaacgaggcacggagggtaaaaaaggaaaaggggaaaaatcgtggcagaaaggacaggtgaaaaaacggaaacagcgctgtcctgatgtgttcgttcgttggttcgttctcgtagttgtagcagcagagggaagcgtctgtctgcgtcgggtgcgtgcctttggaccggaatatcctggaggataaaccatccgatccgcggggacggtggcagcaaattggcaaatgcgcgcgatggctggccatggcgaacgcatccccaccccgaatattccccattcccgcttccttcctttctccaacgacccacacccaacactcgatccctttccccttcccccgccttgttataaattaggctcggctcccgcttcctcgcgtcgcgtcgcgtcgcgtcacgtctcgttgttgcattgcattgcgcccacgatcctcctatacgcgcgcagctaggacatcctccgaatataatggcccagctcaaggccgcgcgcgtcgccgacgtccccatggcgctcgacgtcctcgccgccggcgcccccgccacctccgccatcctcggtacgtacggattattcaatattcattgcgtggcgtcgagacaccgtgccgcggcggcgttagttatttccttggttatgcagcagaggtggacgcggcgggtgctcggagcgccgcggcgggcggcggcggcggcggcggggggcagaggttcgcggtgatcgggcaccgcgggaaggggatgaacgcgctggcgtcgcccgaccggcggatgcaggaggtgaaggagaactcgctcaggtcgttcaacgaggccgcccgattccccgtcgactacgtcgagttcgacgtccaggtaacgaaaaaaaattcttcatcatccgtccatccatgtccatccatccgtcatagcggtaacctgggtggggttgagctgctcgtgctaaatttgggggtccccgtgggcgttcgagacgaaaaagcgagaccaatcaaggaaaaggaaaggaagagaggcagatggggagatgggttcacgttcacctgggtgatgggacgggtcgccggcttcctctcctcgatggcgacgcgtcagcgccatggagggcagaggagtgggggcgccgcgtagcgtagcgagcgctcgccgccgcccgcgggcgaaacagaagagccaacggtgtggcgacgcgtcgcggtgagctgctgttccgattcgcggtgtcacacgtaagccccacgcgcccgcccgttctcgctcgccttcttgggaaatacgaatcgatcgacataataattgcccttcttggagaaactgaaacgcgaatcgaaaatctcaccggcacgattaattggaatttcccgttccgattctcctcgtcacactggtgctgttttataataaacctaaataaaggggggttgttgttcgaatagccagcttccaattgtgaatttgtgatcttggggcgcgggggggggggggggggggggagggagtagtatgaaatttggagatgatttaagacatttaaccacaccggattaattttttaatactcacagagacagaaatacatcctttttcagctatatcaagattcttcgtcgagtactccattttatactagtcactttggtgatggccatttttactcctttcagaaattgtgttgtcagatgcccggaaactttgatgtttgcaaccccaatatgtttaggattatcaaagaggaacaggaagacacttggtttgtccaaaaacattttgatactagcattactttaaatgaaaattaaaatgtcacgtaaacaaatgaagtagctaggccgacacaaagaaatggtgtatggaacaaattatctcccagctcttttagtaaaatacgaaacgagttaggttcgctcacgaggtaggtggcaatggatatgggatatgggatatggtccagtttactccagtgtcagctcagctccgaatcaacacagtgggcctttgtcgtttgctcatacaccccacctacgcactaaaagaatctataaagtatcttgtgctgtaacgcaaacatggagcaattcatagtggcgacacttcaggaggaatcattgtgtcactgggcctgtttttggcttggagcaatggcttatcagcttgctctactgattttgattcttgacagaaacaagagatagggtagaatgggtcatatctaaactacacttatggtgacacattctcgataaatgtttccacactcagtttgcttaattacatatgaaacttaaaatgctgaaagaagatactgatttgtttactttttgttcttgtccttctctctttgtctcttcaataattcggtgtgcaaagatgttgagaagagaacaaaccgtgaatatcaattttgcaggttaccaaggatgggtgcccagtcatcttccatgataacttcatctttactaaagaagatgtaagttacttttcttttactgtatgaattacagtagctaccttaaaaattcagacaaaaaagtaacatcattgagactgtcatataggcatggaccatttcgtgaatcatgtgatatatggtaaagaaaaaactaacctgtatccataatggcatccattttcagggtaaaattttagataagcgtgtcacagaccttcagttggaagacttcctgctatatggcccacaaaatgagcagggaaaggtatgctagaaactatttttctcatttgaacttttggggataactagaattgattttaactttggaggataactagaattgatctgatcacatattggttggttctgaattcagggtggaaaacccttgctacggaaactgaaagatggtcggatagtgaattggaatgtgcagtcagatgaccctctttgcacacttcaagaagctttcgagaaggtcaatcctagattgggcttcaatattgagctcaaatttgatgacaatcttgaataccaggaggaagagctcacttgtatcctccaggccatcctgaaggtatgtgttagcatagtgttatggctattcagaaaatttgcagattgatacctatggccaatctaacaacatctcaccttttatctgtactacctgatcaggttgtttttgagtatgccaaggatcggcctattattttctctagcttccagcctgacgctgcacaggttatgcgaaaattgcaaagcacataccctgtaagtacactagtatctgatgcattgcaaatttgcaagttccataacagtacttttcgtaccatgaacagttactgatctcctcatcccttgcatcttcttcaatcaggtttactttttgactaatggaggcacagaaatctacgctgacgttaggaggaactcattggaagaggccatcaagctatgcctcgccagcggcatgcaaggaatcgtgtcggaggcacgaggaattttcaggcaccccgctgctgtaccaaagatcaaagaggctaacctctccctactgacttatggaacactgaagtaagcagtacagtttacggttacctcgagcactttcttgcattatatctgaatttcaagtgctcaaaatctcccatcccttttgtgcagcaacgtaccggaggcggtgtacatgcaacatctgatgggggtgaacggtgtgatcgtcgacctagtgcaggagatcaccgaggccgtctctgagctcatcaccgtcccggagcctgacctgaacgccgataatttgagcaatggggcagcaaaagacgccgcaacgccacatttctcgcagtgtgaaatctcattcttgctgaggctcatccctgagcttgtgcaataatcgatccagttgccttgctggtctgcagactttagtgactgatctgtatacaggaagaagaggagagaccccttgtggagggttacaagtttacaaaacttttaaataggttgatgtactagagctaagccctggtcctgttttttaatttgccctggggacgtttggattcatgatggatcatggatgatgcatcctgtagcaaggagttgaaacagttgttgttactgttgtatctgtaagactgtaacgacgacctatttgggtggagttgaattgcaatgcggaatttggcaagggcagctgtaaaatgttgagctttgccaagataaattgttgcgaggattcaaatggatttgtggcagcaatttaaatgatcacatattccatctgtttttccgttggggatcacctggtaaacatgtgcaaatcttgcagggacgtgtaggattacattacacttacttttcctgcatagcttcaaagttgcaatgctcatcaagttctgattttcggtgctacgattattactgatgaagtgatgaggccccacgccgcagaactgtctgtcctgaaaaactgaaaatcggaaggaagatagctgggccgggccgccatctgctgtccagcccatctgtgcatatgcacgtgctcttcaaggcagattggcaacatcagattgatcactgtcagtgtcaatggctgggcatacaacacacgacatgtttaagcagttcggtccactgacaaataaacctgttcaggaggcagacagaaaatgaaaaagttaaaaaaaaacggcatatagttctccaagcgaattctcataaattcacttatccattatcctcaaaagataaaatatattactctacaaattcacgccgttaaactacatctatataacaaatataaaatatccaaaacactcttgaaatactgtatcttttaaattatttcaaaattatatattcaatttctaatccccttgtattcctttaattaaataaattattattaaataaactattgatgtctatggttctaaatacgtcacaacacatgatgccgacatataataattaatattatgataatattttaaataatttcacatcgtatttttgggtgtcaaatattacttgacgaatgtacaacgctacggaagcagacaaaaacctctatcgtttccattttcattttattttagaattggaaccggaactgaaaacaaagagaataggaatagggatgaaaatggttcggaaacggacagaaaccacctttatcgtttccgtttctatatttttttcggaatcgggaacccatgatacaaaaacgaaatcaaatattatcgaatacgaaaatggagcgaatacaataacggatatttatcaaaatatagaaagcacttaaaactgaacttctcaaatcaactaagagatgtagctcaatattttttttctaaaaaaataaagctattattctacattttatcaattaataataacacaactagttttacactttactttcttggagaaaaaaaaactatatccatctataactataattataagtagtatggtctaataaaaatagcaattacgcaaaaaaaaaatctaaagttcttgactacaaaatatctctatttaattaagcacctcaatacatagtataaatctaaccatttagagtagagaaggctgaagctaattagttgtatatgagaaatactatgttaactgaattcatttccggaaagtttccgatggatagtagccttattatatttgtttccgtttccgaaagtttccgaaaaaattctgaccgacatttttcattcctgaaaacatgtccggaattgggaaactttccaaaccattttcatccctaaatacgaactggcgcgaatacggcaacgaaaatttatgggaagaaaaaacccctcaaacttagcttcgaactttgtcaagtccaattactgtctcaggtctcaacggtcaacagtatatcacaaaacacaatcaattaggatgctaacttgaatttgactggagtattattatggtatatggactatggtatgggcctttgtaacttcgaaaattctgagaaattgtttgcaaacctattctgagttccgacggaaactgcctttatcatatttgttttcgtttccgaaaaaatttcgaccgacagtttgtgtttccgaacataggttaggaatccaaaaagttttcatccctagatgtatgtcatacacctagtgatgtgactataagtatactccacagattagttactgtaaataagtttagtaaattaacagcattctctactaaaggtgtctcacgtgattatgaatggtaggtgttgaaaacaaaatataagcaataatatggtgctatggagattatcgtggtagtttttttttcttttaaaaaaatcactttgtctaggtttcatataaattctcattggtttgggacaaaatttgactctttatgtcaccgagggtgtataagtaatataagtctatatttaattagataaaatagtcatattagctatatttttaacagaaactatctttcattaatatatcataaaaattatctatagcatacaggaaaaaatattacttaaaatttagaaaatccaaaaataaggtatggtaaatattgcataggaaagaatgagacgtagtacaaatagatacgaacaaactctactatcgtgacaatttttgtgttttaagtaatatgcccaaaccaattatttacaaaaacatgtttaacatagagtcaaagaatatttcgaaaatattatcaacataatcatttgtagtaaaaattaaacaaggttcctgtgcatatgcgtgggctaccctcctagttatagtaaaaagcgtaaaatttagaagattgagaagcgtgcccataataatttagtgctattagtgtttatttgttgcatggtgattggtgaagagattctagtgttataacttgtttttttaaatgctctataataattatcggctaatatatagccttttacacatcaagaagattaaattttagaaaattataactagttttgtcaaagctattatttttctacaagtctagctcgtcatttacaaagctgcaacaataatacacgatattataatcaggggcggagctagagcgaaacagagcgtagtgccacttgtttaatttactttactttagatcaagtttaagctgatacgggtgtctaagtttgtattgagggggtgcatacatggtgaaaatagatgaggtatagctaaaaaattttcttgaccgagttcctgggcaccccctaacatatactagctccgctcctgattataataaaattgtaactttgtctccctcagaaatttggatccacctgtcacacatatatacttccaatactctcattgtttctacttagccccacctgtcaaatatgcatatagggacactatggtaaggctatagtataagtgatagttaaattaaataattacacttttctcaagtaaacaacaaagtcaaatcatatgattatgcttgaaacgtgaacggagagggacttagctcatatacagtactgctgctgccgtagaaggcctccaccttttgctctatataaatcatttgtcgctaaaatttaaattttgaaaattttcatcgaagttttttttaaatcgctgctaaatttgacatttatatcactaaaaccatctatataaaaaattactcataaattatttttttaataagccatacgatatattattagcttaattatggccaaatgatgtgagccgtagtcgcaatcatatgagccacggtactgcagaacagaagatctcattctaacaaagaggtttatcagcatcgtcctcgacgcgggacacaacgtgccaaaagcattgcctattggcttcctttcttaagagcacccgaaaaaaactcatctgctcgggcgtttgatagtcggtccatttttatccgtctctttttacatccaaaacgtcacatcaacactattactaatattcatgtccaactttaacaaagcttttagcacttttttctcctaaactatttattcaatatacgatccgatcataccattgtatttgttgcaattgaatatttataacaagatctcatatgattatatttcgataaaaatatttgttttccaattttttgttgcagtagattttttaaatgttgcagtaagtatattacgatgtttcactacatcatttgtaatgttgcatgtggtgttctttgggtgttccagaaagtattttgtgatgtttcagaaggtatttcactagctctataaaaaaattagaatattgcatgtggtgttctttgtatatttcaacagatattttatgatgtttcattaagttattaaaatgttgcaagtggtgttatttggatgtttcactaaatcatttataacgttgcacgtgttgttctcgatgtttcagcatgtattctgtaatgtttcaacaactacaacttaatgtttcatatataatataaaaatatttcaattagtaatataattatgttatttttgttcatcctaataatgtgagatctctttgttaagatttaattgcaacaaatccaacggtgcaattggatcacacatcaaataagtattttgtgaaaaaaatgatttaaaatttgctattaagggaatatgaggagagagaaaggggtgcgaggatgttccatgtacatgacacgtggaagagataaatagttccatgcctgtgaaggttcccggagagaaatagttacatacatgcttactgacggcgcctgtttttttttaataaaaaacaaatgcttgatatgtagtcttgtcaagggtgagaggctaaatggtaagaaagaaaagaaggaaggaaacaatcacaaaaagggagaaaagaaaaagaaaagacaaaagcaataaaattcgcaaaaagccaccacctccaccttgtttgagcagatcaacacaccacatgcgagtacgtgacgatgtcccctctcccctccttcacctccggtgaatggcgtcccgtatcgccgcccgccacctcctccgccgccctgcgacggtaatccggcatccctcccccctcttcttacgcatgacgcgtaaaatgtatatgggggatttaatgcgatggggcctgactcgttatgagtctcgttgttggggttgattttggggctggatttaatttgttgtcccgatggtggtttggtgctctttccatcgcctctccgttcatttttcttctgtgttattaggatggtaagaatgcgattttttctagttggttgttgttgatcaggacggtagaggatgcttaaactgtgaaattcgaggagattgcaaattttattttttgtttgctcgatcatgcggtttggtctgattgtgtcgttgccatgctgtagaaaaaaaaactggagagagcatggtagcttctggagtcgattcagaattttttcacgcggacagttagcgatagcaaaagcacaggaacttttgtgtgcaatcatgttgaggtgatatgctggctcccttgatcattgattacctgttgatttttttaaaataaattaaggaatatagatttattccggccaccgcataagaaatggattgcctgttgatgattgcctcaactgcatgatcattacatattaatttaaacattttgtgaattagaatgtgattctagtaaatcttcacgcgagtttaatcttcctactcgatgaacagggacaatgggaacaagtcttggtgtgtgtcactgtgtctgttgaacatcttcatattagtttgtcatttggtttcagtcgcgctagctaccaccgcatcaccaaatatgagctaattagatccatgtcatcgtaaatatgccatattgaaaaaaataccactactatttataaaatcggatagataccactgcaatcttctaaaattagaaccataccactccattacaattcccgtcgtctctgtcacattttctgttagatcgagcagcagctggctgtctcccggccctccggcgccgtccgccgcggccaacggagcggcagttcacgtgggcgcagagctaggcgtcgatgcaggggacgtggaacgcgaggccgcactcggggagtaggcggaggagctcgccgtcgcggaactcgccgaggcagacggggcagtcggtggcaccgagcatgccggcgccgtacgtcgcggtaccgcgtgagggcaatggattcgatcgcggcctcatcgagctgctgctgctggtgctggtgcctacggtggatgaagcagtagattttttgaacgatgatgaagcagtagatggacgtgttcggggtgcggcgacacgacggcgccgcccttgccgttgctggccgtcgtaagcagctgcatcgtcgccgcctctactgcgccccgccgcggcggccgccggcgtccaccgtgcgcatcatccaccgcccaggaagcccttcgcccagcgccggaggcaccatcccccggacgcgcgtgagcagctcgaccaccggagtcgaagccgatgaggcgcacgcgacaaaacggagaagatgatggggagctggcgcgacggccggcacgggcggaggacaggccggcggcagtcgtggctgggcctggcggggttcgcggtggaacggagtcgtcggacgcgcgcgcggaagcgaggggggagggcggcagacgcggacgcctccgtgccggcgacgacgaggagcaggagaaggcgccggcgccgcccgtcgccgtcgccgagctatgccgccgaggaagtgcccgccgcctccggccaaggcgccggaagccccaccgtcaccaagttccctcaccgccgagctccttcgccgccgccgagctccctcgtcgtcatcgtgcttgtcttaggagagatcgatctcgatctcttcggccaggccgttcgtcatcgtcgtcgtcaagcagcacagcagccgccgatcttgggccatcttcctcgccatcaggtcatgtccctggtcccggtcttgagctcctcgtcgccggcgtccccgacatctgctccggccccgccgtcctcaccggctgggccaccaccgccagggctcgactccgacgcgaccgtgtgggctcgcctccgccggcacggcgcccgccacccgcctggacacctgctcgggctgctcctccgccgctgccatcacctccagtttgctccttgttacggttgcgtggtctcggagatggcacaggagtacaggacggcaacgatagaaataacgggggatgaccggaaaaatggatggaaaatacgacggattggcacggttctaattttcctaaattctagtggcatctagccgatatcgcgaatagtagtgatatttttttaatttgacatatttgtattggcatggatccaattaacccatcaaatattgttcttcaaacctgagttttccacttgtaagtagtatagcatactaccttgattatttttcactagcatattacctgtacattgcaatgggattttaattatttaaaattatcattaaaatattattagcatatcttaattgttattgttaatcacatgttgaccttttctttatcatactaatattttttcttccaaaaaagtagagtgatggtgggagtagttaacatgtcggccctttagccccatatgtttttttccttaaaagaaaaattaagagttggtagtaggagtgatggctcttttataagtaagaatagataataggcttaaatggttcgaactgaaaaatcagccaaccagccagcccatacgtagagagagaaacaacccaatctaatctaatcctaatctaatccccatccgggcaggcatccacggatgtttggttgatgcctaaccttgctataactaagtataggctagttaaggcatggtggcacaagtgtggcttagaaatagttggccataagtgtagcatgcttagctcaaaatttgagagtatgacatgtgggtcccaaggctaagaaattgtggcatggcataattgcggtagcgaaagaaacacatacctaagatattgtggcataactaaagtgtggcgtgccaatgtgtggcaaccaaccaaacacgcttgctgctcgctgacgcgctttccattggcgctttgctcacgccccctgcgctgcacagtggtgcctccacccaccttcgtctattactcatggcatgctagcgcgcggcacaatagatgtggtccaggtggtctttccctttctcgtttttgcggtaaggagagttccttttccttttctaaataaggattatatttttgggcctttgagcacttgagctagcgtgtagcactcataaatcttgggggctttggatttggatgttagatgtattttctttcttttttttggggggggggggtggggggcggttcagttaactcagaaatcgtggtgtcgtgcggcaacctcatcagcgcttgctcgatggatgacagacgaggaaaaggattggaggtggacatcaggggaacgaagtagactcctgtttgggccttcaacatgtgctatacgaaacacaagctgggaaggcgttttgttgacgaatgaaatcataattgtgacaaacagaaaattacaaattttttaagtaggttagattagattttatgggggaaattttggttttgccattgaattctctaattgacaatttaacatgcaaacccagtaccccctggcagtgagatattcattgtgctgaaataaggtgaggggctaaggccggcactactgggtagcagatataagttacttgtttacccattatccttttgttcccacaagcatatacggtttatgttccttcatttacttttgcttatacttggtttgtctttctaacggatctggttcacttgcagacattatgcttcttacggagttataaacatgtcagacatttcagcactaagctacttgaaggttagaaactcaacatttgttagtttggaatcctgacaacctcttagtttgttcaaacctttattttaggtgttcatggatgctcactgccaacttggtaatgatcagagcgagcaaacttcattgtcattgtgtgcctgtgctgtaaaagttgattatttggcacatccttgctctctatggtttggaattgtcactacactttactaaattcatagttcttaacaaaaatgtggcatgtaattcatatgtagcggacgatatttcctttcaaatgcttctccttatcaaccttggactagatcatttgcttcaaagaatggtaaggtacagaaaccctatagatgatataatgtttacaaatttctaccagttaaatgcttaatcaatttttttcttcctttaaggtgacttggttgatgctgttgttcccttcatgggtgaatccataaccgatggaacccttgccaccttcttaaagagtacgcatctatctatatgcaatttgagtggtcaaacttctttgtattcacatgctatctgatacagaacctggtgatagagttgaagctgatgaacccatagctcagatcgaaactgataaggtgattctgtgcactgtttattcttgttttcaacttctaagctattgttgctatcttttgcaaaattgttttcagaaaatgaaatacccttttatttcaggttacgatggatgttgctagtccagaagctgggataattgaaaaggtaacaaagagccttcccctgatttgttatttccatatttgctaaatatgattctttagtagattacttttctaaccacatcaatgcattacagttcgttgcgagtgaaggtggcattgttactccaggtgtcaaagttgctatcatatctaagtctgctgctcaaagcaagacacatacacaatcatctgaagatacctcccagaagcatagcacaaaaccaccttctacaaaggaaaacaaggttgaggctaaaccaccaaaagtagagtccagcacaacacacgaatcaaaactaacttcctcttcagaaccacaactccctcctaaggaaagagagagacgggtaaggccatatccatcacttagttacagtacatcatgataagatatactatgttacttcatattcttgactcttgcggttgcatacattttgtcaccatcaaaatgcaggtgccaatgccaaggcttaggaagcgtatcgcaaatcgtttgaaggattctcagaacacttttgcaatgctaattacattcaatgaagttgacatgtaagtgcatcattagttggattgcttatttcttgtacgtctgcttggttaatgtaatgcataagctgctggcttttggccaatttaagataacgggaataagctattcatcctagcgcgcaataatactccaatagctatagtattggttcttgttcatgccaataagttaacgtgattattgtgtaaatgaaacatcagactactatgtttagttgaggactagcatcaatgcacctcatatatttatgtgctagaagaaacggattatcaatggagtttgaatctatatggctatttcctgcatatgttacatcacctttttatttactataactttcagtgtatacaaggataaatttgctttgtgacattcatcttgttgctttcacttttctatatctgtttcaacatcatatgtactgtgatgtaggactaacctaatgaagctactttccgattataaagatcagtttgttgagaagcatggtgtcaaattgggcttaatgtcttgctttgtgaaggtaatgtttacccctttttttcttcttcttaatataatgatacacatctctctcgcgtgttcgagaaaaaaaaaacgcaatcttatgagatacttaaaccataattgtggcaattgtgtgggttgtactaaaaacccacttgcttttgcaggctgctgtttctgcgcttcaaaaccaaccaattgttaatgctgtcattgatggtgatgacatcatctacagggagtacattgacatcagtgttgctgttggaacttccaaggtatcgccacctgtttttctttatgttgactgccctaactattattttatgcaatctgttgtaatgatgtgacatgtcatttgttttagggtcttgtggtgcttgttatccacgatatagatgcaatgaattttgctgacatagagaagggtataaacaaccttgcaaagaaggcaactgagggggcacagtccatcaacaatatggcaggagggacctttaccatctcaaatggtggtgtttatggaagccttatcagtacacctatcattaattctccacaggtgctcacttgtttttttttgctgccttgtaattttgtttgtaagttccctctaacacgagctttatctaatgtagtcatcaatcctcggaatgcattccattgttcaacgtcttgtggttgtgaatggcagtgtccttgcaaggccaatgatgtaccttgcactaatgtatgaccataggctgatcgatggtagggaagctgttctcttcttgcgccgtatcaaggatgtggttgaagatccacgaaggttgctccttgacatatagttccatgcatcatagatggcctacaaatttcactcgtttcaaaataattgcatgaaaaagttgactcatgtcatgcttgcttatccccaaaaaaaatagatggttgcaggcctttagacttgtacaagagggcatttctttctttctttcttttgttgaggtattacattttaggaagatgttctctaatgttttaattttactagagagaaagacgattactatttaggtcaaatagaagctttggagccacattctactgaacttttggcacacaattgtgaaaatgaaatggcaaccaaacatgcttttatactccttgaagtttgcctaactagcttgtataggcggaattggtctccacaggatgtgcgggttggcacaataatattaaatatctgttaacttgtgattctcattggtttctacgatagccacaacaagttgaaagaggccacaacaagtttgtatacaataacatcatctgcatttccttcgttacatgtttccactaaaaccaatagcacaaatttctccgtattttgttctgcgttgccgtcattttttgtgtttggtgtattttagtagttggatatcaggtattgtaaagtttatgagttctatgggttaaacctcactgatgcaatgttgcatagtgctaatttccaattccatgtggcgtgccatatgattgtgaacaatcagacaatttcccctagcaaaaccattaaaaacctcaccctccatgtacttcaacaaaatgtgcaaaacaacatgagatgactactgcgtcagcacaacgattcttacacaggttgctcacagagaaaatgacggcttgttgttataaattgtaaccaacagttaatttttttcactaagtgaaaacaatatgtgtttgagagaactcaccagaactttgataaactactaggctaaacctctacactagccttttctacattatactaaaccagcattctcctattgcaaactcagaactccaaagtcacagctgcagcagacgcaaccaccccttggtgacctggactgagactcgggactaactcatggtgtaaagctatacatatttttcgatttcccacacgatattccatcttcatttatctagcaagttgtcgatatcagttgttccaatgagatgcttcttgatcttaccaaggctgcagaagtgcttctcccttgtgttaataggtacaacctcttgaacaaattcgcacttcataccagctgaaacctgtacatttaatttatgttagatgtgtcgggaagaatcaaaagtctataaatggatacgcagcagatatttcactaattacatcaaacagtgcatctccgagctttatcttcattttaccactattgcacacaagtatcttccccatgaggccacttggaagctcatacagtctacaaccttggattgactcatgcctcctcttttgatcactccaatctaatgctgtagtagttgaattttaaattgcatgtctgtggagtgatatatttcatattaatttatcttactaatttttaaatatttttttaactatttaggtgacatgcatgaaacaaggggatatcctcccctcgagggatgaaaacaatttccccatctctccccctttccggcggctccatcgactacccaagagggacggggaggctacccgtacgtatcgatctggcagggcaccgctgctacccctcgtccccgcggtgtggcctcaccctccgcatctatggccagtgcggtggtgctcggtaaagtggagcagtgcacgtacgcatcggttgcggcggtcatgttgctcctcttcttcatgtcgtcggtggaagccaggggtgacaccaacgacatgtacaagctgtgcgcggacatggcgatgcagcgtggggatgaggaagagtgggccgccggtgaggatattggccatgatgctgccgagcaaccacctatcaacgaggaagtcatactcccgtgaccccaggatgagctctagcacgcggtacgatagcgtgacctttggtgatgtgtatagcggtgctccggccttggtgacgagctacgtgccgaagtcgctgatcttgaggtcgtcgtgggggctgacggcgatgttgtccggcttgaggttccgttgcatgatccctgctatgtgcattgctgtggcaccgtcgaggagctgccacatcagttgtcgcaccgctcctcctgcacgacacgcacaaggcttgacctgttgatgtactccgtcacgacatagcaacacgggcaagctctgccatcgccacccctcttcatctctctgtgtgtcgtgggatgctcaacaaggtacgggtggccctggcacgcctcgaggcaccgtggctcgcgaaagcactccacctcaccgtagttgatccctctatggaggcacttcacggcgggtttccctagtcctcgggtcctgcaccctatgcaccacaccctcgacttcctcccgatcttgtcgaggcacttgtagtgcttcatggtgggtggccacaatgacgggtgtcaaggggggaggggggtcccttggacagcggggagtggagacccctccccgagagtgaagagtcgaccagggggttagtaggcgagcggtgcgaggtatctacgatcacagcggtttcacggggctcggccgccccgcgagaaggaggcaggaggttatacaggtttaggctacccagaggtgtaataccctactcttgtgttggtgttttttgttttctctagatcagctaaatacaagagaggccttttcaggctacaaagcgaaataactgacatagcagaaagcaacccttcatctgtatctattacccttccttttatattccaaggaggggctcacattattacaaatctactcttagtcttgtctcatcagccgtcttgtcgttgccagctggttcccttatgcaaccctcaagaaacccatcaagtcttacggttcatattaccccgggctcccaggcttcgtttgagacagttgggcctccgccagtgtgctcaccacgtggtgcgtggtgggcccgacgaggcccgacctgcccgaaacagtgccacatttgcttctctgcccatttggctaaatcaagtggtgcggggcatgtgcggcgtgtgtcccaggcgccaccgtccaaagtgactcaacgctggcgtcttgtccacgtcctttcaacttagactggccagggatccccctataatcctgtttcatttatggcggggcgtgctgccttacaactaattgtggagcacgcccaacttcccagaagtttctgaggtcgcgtcctattgcgcttaaagaaggtttattattccttgatgagtttctcgaaggcgtcgttgacgaaagaatatcttgagattgtgtgtcttgtaccttctgtcgcccctctgagtagaggggcgcgagctatacaaggtccaaggtgagccctgggcccgaggcaaggccgggcccgaagcacaccttggatcacgcctttatgcttggcaagcctcgtcacccttcttccttgagcaacgtgtgacttgtaggggctaaggcgagctcagggcccagagctaggccgagcccgaggcagatcttatctcatcctcttaagatatagatcttgcatgtttttacgccctcttgccgaggattgtagaatctgcaagggctagggtgagcccggggtatggaacagggccgggcccgagacagaccataggctatatttttaaggcatatttggggtatgcttggggcccgagccaggccgaaagctacttctatactcggagttttggaccatatacgcagtatccctcctcagccagagaaaatcccatatataaaatcttaggtgggcccaaagccctccggaagggccccctagctacaacaccctagggttaccttttatttttaaatatagtgctatttatttgagaatgatccttttgccgtataaatgggtacgtgggttcccatttcaccgacaacggggtcctagacgggaggcggcttgtggtttgtggagttgtgcggtctcttataggggaatcgaggagttttggttacatcatgcggctgagacgcaaagtgtgaagcgagtgctgccgtagatgccaagtggtggtcttggatgatgccaccgaaggcccaggtgacaccatagaggctgacgccaccacattcctcactgacgatggcggcgtcttggtgtttgtgcctgataaccatggtcaccgtctcgtactggaacaatagtgtcaccacgaactcggcgattgccgcgcggtacagctccaatgtccctacctccaaatcagcctctgcgcatgcggcactgctcactctctcgcacctaaacccctctgccaaccctcctagccatgccgctggccctccagcagccggcgccagagtgcatgtgagctttgcttgagagagagagaagggaggaggaatcagagaaggagaactggggcttacaagtgggccccactattttttatgtttacccttgtggttatacgtgggacccgcttctattttcggtttctttgatgaccgggtgccacgttagcacacttggaccaagtgaaactgctcccaaaactaacgagggagttgatttgcaccggttttcgaagatgggggaggcattatactcggttttgtggttgaggtatgcgattcgaccaaggacaagagatgagggaggcaaaatagacttaatccaaatattgaaaatactattggtaatgtgtagtattaggaagtattggtggtaaaccaaacattgacaaaattactattcaaaataccaatattttggtatggcaaatttcggcttcaaaccaactagcccttacatacatttccctctaaaacattctaagaaaacatttgttgagacaaaaatgaaatggtataaattcgtctaaattttattttatttttgatttacatgaaagacgcatacacgcacatacaccacactcacacaaaactcttaacccacattaaaaaggaccattagaaaatcttcagcatcagtaaaatcatattaaaagtacatccgcgtgaggaaaaaaaatatcatgaatacacaattccaaaaaaatataaaaatatacgtgattcgcttagggaacggatcttaagcaatgcaaagcattgtcatcatcgctaagcggagtggcgacagcggtgtggtgtcgcgggagaagaggagaggctaggaccttgggtatggcacgactaaaacaccatgccaccgtgcttctcgaattcattacaaaaatgattcaataatactatagtgttattataaatataatgttgtagaaaccggtcaaacatatatgattaacgctatttaaaatttcacaaatattttttcttgtaatagatatgtaaatattttaaattctgcacaatataatcgaagtacgttgatgataaatataactataaccatatttctttagttgaacgtaattgaagtatttaaagtggtcaaacacacggaatatatcagccaacttgtagacaatacgaacttcaaacgaagtaaatagcacactttttgttgtatagaaatattactatattgcacacatttacttcttattagtcgagaaatcatccgtccgccctttcacgtcccacctagcatggtcacaattgacctcctgaaaatcagaaatagcctgttttttcaacttcatgcatattccatagttcattcttaattgtatggacgcctaatcatgaaaaatataatctccataaaactaaatgtttcgttgcaatccatggacatcttaccaataaacatgtaacacaaacagatcaataagagcattactataaaataggtagcataaatagcatgtaatttttcatatccaaagaagtcctgccatccaaatagttgtttccattgaggcatctaacatttgaaccaatgcggcgcagattgcaaagcctgcacaaaaaagaagagtgcagcatgcagccttccacgagagacaagagccgctccgaatagccaaggaagacatgcctatatatgtatgagtacagagtactacacacacatataattgacgacaggactgatcaggggataatcaaaatgcagatgagcagcgtataaacacatgcacataggcattaggcaagtcatccttggctaccgaatcagctcttgtcctcatggaaggcccctcctctactaattaagctctgaaattaaccctctcaaatctgaatctttcatgcatggcttgctctgcttcattacgcatgtcttcaggtatttatagcacagaaaaggtatatgtgtgcagggaataatattagttggacaatgcagtgtaaatgcatttatatatttgtcctagatacccatatctcccctcaacaacttcgtctgctctttgacatctatacattttgtagtaccatcggaatatattcggttaggttaggttttgacagcttatggtcatggtctatcagctcatttttccctcggcacatgcccaatactgtccgtctatttctgaggtctacaaggcaacacgtctcaaataggttcaattgtcaagtttggtatggctccgactccaagcattctcataaatatatatggagttcttagactctaaatatagtagtttaaaagttaacttttaggcataaaaatatgaatatgacggcctactaaaataactccgagctactctgaacttcaactctaaggactcctttggagaataatcatgattctgtttaattcttataaaaactctcctaattttttttcaatttaaaagaggcctaaaatttgtttatttatttggattggcaagaaaatttgtaataattgaactttatcatgtattacaaataaaatggcggagctaggtccttttatgatgtttcatcttttaagccagaatctattgtttaatagagctggccctggggaaacttttttttttatttttagacctttttatgttttaattttattaatagaccattccaaaatatatttctaaatctaaaccttttagtgtggcctaataactctgtcatgtcgcgtgcagtgggtgtgacaattttgtcttgccatgccagcgagagcgcgtgatcaaaaaacgctgccacgcaagcgcccgccggcgtggccaaataatgttgccccgctagcaggagcggcgtgatagtataggccaaaagtttcagatcttgaaaataaattttggatgggtttatttttaaaaggcatgtctttttaaaattaaaaattaaaaaggttcaaaaaatatttaaaaaatcgccctggggctgttcctaactggtttcgtccttgcaaatacccaactccaaaagctcttgtagtaggagcccaatatatcaagcgggtccaatatatcatgtcttttcctatccggtatacatacacaccaatagatactacaatagatttgctggggcatataaatgatgcacctaaaataaaaggtaaaatctaattcccgcgcgcgaaatagtcttacagcgagacgccatgcggtagccatcgaaagatgtgagtattcatgtagtactagtctatttaaaatttttgatgaattatatatttcaaaccatatattatttttaacacccgttttaaccattgaacttcactcaaaatatatgataaaataagtacaatattgaatatattaaaatatttaaaattaatttagttaaatgttagaattaactaagctctataatgaaagtaactttttatagcattagaagtaattacatatatgtgttaaaaatatcttcataggtaaagtgtagatttacaagtaaatacatgccttttttattcgaggtaaaccatatgtgtgtatagattattgttttcgataaatgcaacttattttatataagaagtaactctttagaaaataggataaactattcacagtattagtattagaagtaactcttaatattagaagttactacattcctagagaaaagtaacttaaaaaaatagaactgaccttttacgatgttaaaaataactgcactgccagagggaagtcattcttcatggtattaaaagtaattataccgctataaggaagtaactcttcatagtattcgaagtaacaacactgccatagaagtaaataatctaaatatattcaatattgagctcgttttgttatatattttcaatagagtacgatggttcaatcaaatcttgaaaacaatatattgtttaaaagatataagtcaccaaagattttaaaagtaatagtgcaatggtactagactccgttagcacgtgagacgtgactacatagtactaaaagtggaaatgcactatgacatctctttttttttttaacaaaactacgtctgagggacgtgatgcttctatttttagcaagtacattcatcgttgtttaggactagagagctatcactcttgttgtagtcactttaatacatacatagtatacctacacatctgtatatacaaataacaataacatcgaatcattcatgctacagttgaaggaaattgtacactcaatcaatctccttatacactaaaaagtaaaaacatcgatcctaacaaagtataatgttgacaattatttaagtcatcactactaggaaaactattctccaaaatgggtcttcgcagacggacgaccggtccgcctgcaggaagtaatctgaaagaactgaattatatattcgtgagatggggaagtaatctaaaatataaatttcaaacccaaccttacctaccttggttaacatagttaacattatacttaaaactaacttccaaaattctatcatggctgctgaccatccacctgttcggcaaatttcaaatccattgtcccttttgacattttgcctgccttttgacattctctccaactgaaactttgttgtctttttgaccctgttaatttgttttgtctccagatagaagtcacagattataatggatttcaacatctttccatctgtgcctgtatgcatgtgttccaatggaataatgatcatgttttcattaatctgggaacgtgcatgatgcccaagtatatcaaaagttgctgaattgggaatctgagctcttttgataaactagtttagttgattactccacttgtcttgatgcaaacaaaaagatggatcgatctaactttacttcaatattttggatgcagtagaagatattttggcacaactcctgttaatacaaaaatgatccatctcatcagcatctcaatctctatagctagcttgctagaagatgctttgctactttccctcttggcaccttttgatggaacaaaaatgcatccttttggtcaattaatgctacttcctgcatcccacgtacacattgaccactttacttgatcatggacactctctggtttttaataggtaacatcattaccttttgaatgtatgttccgtcttattttaaaaaaatataatataaaaaaaatacatgtttatggtacctttaatgataaatcaattcacaataaaattaataatacttaagtattttttaataagatgaataatcaaaagttaacaacataatatattaaaaaccgaaaaaagtattattttccaacaacggagactagaggagaggcttagaccagatagcgcaaacatggaaaaacatctaatatatgttgaaggggctgcttagaagattgattgctaaaatagcataaatattaatactatacccatgagtttcatggtttcatctttatatgaagttcccctcttaattatccccgtttcttgaaatatatggaactattttccaagcatatatgtagatatatattacatacagcctagcagtcctcattgcatggtagtaactgtatataagtagtactattattatatgtatgaagtttcacacttagaaattttactttatagtatgagctgcaataacccacattcttgctgacttcattcacttcaaaataacaaatactccaaaattccatactaaaagatatatgactatcaacagaaaattaggatggcatgttccaaaattccatatataaatatgatcatgacatggatgaatttttatcaaatattaacccaaaaaaaagaaaaatggggaaatgatgaaaccaactattattatctatcctttatattttactccctccattccatattgtaggtcgttttagttttacctaagtcaacttctctaactttaaccgagtttatctagcagcttatttactatgtcatttacacccagccggtgggataattaattttcagtggttatatgactttaccaaagcaagaaattaagcacccctaactaaaaatgtgccgacatctataataacaaataaatgtagtatcaaaacatatttcaaatggtggatttaatgaaactaatttgttgttgtagatgtctatgtatttttatattataaactcggtcagaattagagaagtttgacttaggacaaaactaaaacaagaactgagagagtatgatcctatatatgatttttcagaatatctaataattttcataagatctctaactgtttatttttgtgttccaaaacctcttatactctcttgttatgaatactagtccttgattgaggaacactttttatgtaacggttccttttttacttggcatcgaatactatctatgtacaaacattaattagccgctcgtattgtttgagaaaaatataaatattttaaaagataccaaactatcaaagcacctaattataactatactacttacattcatcaaaacattgtaatttaaaagtttttattggtcaaaaataaaatcacactggccaacagtactggcaagtaaaagagatcagagagagtgtagttccaatccttacccaggaaccaaccacatgttgaaggttggtcgaatagatggttgcaaaatagaaccatagcggagctggcccctaatctagtaaatatgatccctaaaaagattagcaagcatcctaccatagcacaaactttagaaaatcatgggtggactgctgatatcaaaggagcactcattgtctaagtcattgttgagtacttgcgagtttgggacttggtggacggggtaatcttgtaggatggcatcccagaccaacatcattggatgttcatgaggtctgaattgtacacccgtaaataagcatatgagtccttatttgttggaacaatcaagttcactccatggatttgttgaaggataaaacagagaaacaaatcaaatcaaacatttgagccaattttaatcatatctacacctacccttccacctgaaacattttacttgatacggattttacctggcttaatttcaacaaacttgctttataacccccccaccccaccccaaaagattgctttataagaatatatatgtaaacctttcaaaaagaaataagaggagtacaaaagcaaaagacctcccctccctaatgggccatgaacacatcacttgggacttgggctgctagaaagcgattgggcccaacccaagtgacacagacttggacactagtgctaaggacagccctgttgctgtcaaccacgaggcccacgttggtcctcacgtccacagaaaaacaaagcacaaaaaaacccaacccttgcgccggcgataactttgcgagcccccccgcgtggacgcggaccaccaacctcacctcctgcacccgtgcgcctcctcttctcccgctcacatgacatgcgggcccatctgagtcagcggcgtatggatcgatctggtgaacccggcgtaggtatgacgagcgaatgccacatgggtgacacagctgtggtgtggttggtcgcggcagtgaaaggagaaagaagcgagcgcatggagttcatcgggtgagcgttcttggtagtaggagattcttctccaatccgtgggagaagagctaggaggagcggaggaatccgtgtcccctcccgcggacctgcttctccggctgcccgtaagttggatttttctctgcttcgctccctcccctcctcgcgccattgtttttttcttggtcctttggctctcgggtgcgtcgccaccgcgattcgatctggggggagagggaggaggcgcaggcggagcgcacgagggaggtgggtggaggagagggtggggggcggcggcttagctgctgtggacggcagaaggggtttcttgtgttccagacaagaatcctgaggagtgagagcattacattgacatcctcatcagggctttgggtgtggaaagaagcgtataatgatgtattccttgttcagaatttactgttggttaaaaagtatatgtgcttcaacttttgaggacagggccatagggggtgaaaataagatataagtaaataacttacaaggaaacatggatgagagtgtgtaccataagcacaatttcgttttgtttcaataccaaatattttcttttaactaaatggattcattgacaataaggtatttgcttcaatatgcgttcttattacttcatatcataccacattttgtgattggggaatttcatatagtttcagatgctatgttagtttgagccatatcgtccaaccctgctcactccccctcctaaatttccattttccatgttttgttgtgcaggaaacatgctttctccctatcagcctttgtgatgcattgaacaggggttgagaagtactgtaatttttgtaatggctgggtgttccttggcaacactgagaggacaacatcgagggagatggatccaatctcacagcaagctccccacaaggattatgtctattaatctgccaaagaggtaaaaaagttttccgtactctgttgatattagtcatcttgagttcttcaatggtaatttaatgtttgattttcttcatttgcagtaatcacagtcacaagattcagcttccatgccagtccaatttaggaagaaaacagaaaactggtgcatttgctcctttgggttttcatggaaggtgttgccggatcgaaacatcagttaaatgttatttcttgcagtcgcttgtggattctgagagtatgatctcaccaaatttgttattgctttctgatgaagctctactaactatcagtatagtttttgcatatttggctggagttgtaccctctggccatgcatttcctcatgctagaaaccatagtcaaaaccaacatcttggagctccaggtccatctgattctggtaggtaagagtagctgcttaagtatgacttctagatctcaaaacattggcttgacaataaaaaatgataatgtattctttccattccaatttctagggatatgaaatggttacctgaagggaatactaggttttaccccagcgatacatggagtgaagtgagaatgaaactttcagaagccttgcaatcgaatggtcgagatgccacttcggatggcagcgatagtgaactcaagaacaatcgcaaaaattatcctttgagtatgcttgcaattcatggtggtcccaggctgcggcttcttctagctacctttcagctacttgagatggaggcaagagggccatcaactttttctttctaatatgctggggattatcatggatgaatactgaagattacccatgcatacttcacttatttttttttctaagggagagagcatacttcaaaaagcttaagcaagctggtagttgtgatattttctactaaaatggtgccactatccttctgtagagtattataatggatgaatcctgaagattgttcttgcatgtttcactagcttagttaagctttctctctttgtttttttaatgttacttgactagccactagaactatggactaaagttcagtcagtatcaagatatgtttttctttctaaccagcacagctgtataatatgtcagaacacatgtgttgattttgttgtagttaatttgatcttgtgcaggtaagaaatgttcctgaaagttctgaacttgtagatgggatcaaatggttgcaaatatcaactacgttgattgatggcttgattgaaccaacatttatgaaatggattcaagaagaaaaagcctgggagaacagcaagatcaatgaagtataccattattttcaactgtcttacatttctccatattgtcatgccttcaagtccctgatagttttcttttttcctgataaaggaacttatgaagacggtaaccagcaaaataaaggaggatgacaggatcttgaagaggttcaacagattagggaaatctgaactctatttggatctgctttatttcctgagatttggttctgcaaggtactatttatcttcacttcttgatccatatggtaccacttttttccatctgaactccatctcctgtttaagagtttaagatggcactattggttgtttattgtctgtacttatatccatatatagctatttaccaaacagtaatccttccataaggtaaatgagttcattcttatccttcatttcctgatggcaggtcttatagctattttgatgctaaatttctggctgaacatggagcgagaattttggaggacctggttattttcttagctgacgcggtcgctagtatttacatagagcttatatcagttgatggtgatatgccgactgatgttgttggttccagcttagctctatgctcgctgtcaaccagagaacttcaaagaatgcgtaacgaggtaatagttgtggataattcaaggtgttgcttgtgcttttactgttcaaatgtgcttttcaaaacttgcttgtatatacaccaaaaaataagcactttttatgctcacagtttggatttggtaagttgatgatttatagttggctttgcatgaagttagtagtctccttggagacaagccaacaaatatttaaatcctacccaagctggaaaccatatcaacagactaacagatcttgaaatattttttcttcaagtactcttattgttctcgtatggtattgtagtgttatatcatcactaattaactacgaccagccttctcaagttctcatcatgatttacgtgtaagaaatgaactgtgaacagagacgatgctgcgattctaatatactacattttgtccacatgtgtaccttctgtgtcattttctcttaaccttataagacattttgattgccaaacaaatatttttaagtgaatatcacagtacatgttacgtgaataatctaattgggcaaatatttgcactttgaactctcctctttttggttaatatttttaagtttttaggaaacatctctattccagttttttcttacttccagatttgataatccagtgctaaatttttttaaggtggcaattaatgggtggctgcaccagtattttgagtcagttgtctcaatgtacgaggacaggtttgagttatatgttttatccagaaaactttgtgaaaaaccagcagataatcaagctgaagtgacaaactggtggaggcttggatttggaaagccttccaccgttactcttctagagtacgttcacataagctcattttctcttccggtgagaaggacgaaagaattgagagctctggctggatggtattcgcaatttccttttctaccattcttttcatgaataattcatggaaacatttctgtgcgacttggggcaagatgaacataactttactctgttctgttgcaggaggtattatttcagcctattattagaaatgtcagatattgccatgcctttcataagggctgttgtcaccaaagttagtgctgcagtgtcgtacttctgggtgtccatgataggaaggtctctgggattgattttctcagggataaggcaatcacttggttggagatgatcagatgtttctttggtttttgattgtgagatcttgtgactgagcgatatttgcctcgcagtcatgtccagttttgtcaatttatataggcttttcgttgacctttttttttactgttgagatggctgacttctggtcctcgttatacatgttctgtatcacataatgtaacaaagttcattgatctgaccaaagggtgaaaattatttgttaatcttggaatgcatcatgtggtatataacattttgaaggcaaaccacacatttcaggacattatggcagaagtcagattgtctgatccaaaaacttgtacagatttatccagtctgcaccaatttgagaaaacaatatttcaaccatgagtcattcccactttctatgcaaaagcagaagcaaactgcccagtgacttgcttgggtttgctctattctatgctgtgtttagcctcttccagaagaatttttttttactattttaaatttttattatttcaccagccgcggttggtatggctgttttttcttgcctctagaaagtttttttttttgccactagtgtggccaacgtggcaaaacattactatcacgccaatcagactggtgtggcaaaataacattactatcacgccaatcagactggtgtggcaaaataacgttgacacgttagatagagcggcatggtaacattgtttcaccgtgctaacatggctaaaaggtatagatttagaaaggtttacttttaaaattaaaaattaaaaagatttaaataataataataattctacaaccagctcctccacagaccaggagacgacgatggcctaacctgtcctgcaatttgctgttcggtgaacttccactggaagagttggtgtcctgactaatctaacgacagttgatcttcccatgaacagcttcaatggcacaactccagaaagcatctacgcatgcaaacttcagtaactaatttccatacaaacttcgtagaaaacaatgaaggtgaaccagaatacttctattatactagtagtactcgtagatagcactatagcagtacaacacacaagcaagtccatgaaggctcagcctttactaggaagttgaaggctcaaagtttgttcaaccttgcaaacgcaagcgcattccagcagcagcacgcaacacatggttatttagatctgcatcggttacactttcagtattgatccaactaaccatctcaaggaaacataaaaagagtagaatgtaaccaacaaaacacaggtcaatctttcaattgctgtgaaggccaagaacagtcaacagtcgcgagttggggacgaattcaaaatgcaactgctggataggttgttaagatcagcagcagtgtacgtcatacaaaaatagataaatcaaaggaaatcagtgtaggcttatagactttggaccatgactctgcttcaggagtgaaggaatggaagtttaacaaatcatctcaagtagactagtgtgtctcaagtggccaagtgtatggataaatatactttttaagtgcaagtatttccgtcaaacaatgtgagtctaacacatcatgctgaaagcaaataatagatcgaatttacaaaccatacctaagcatagcactaagccagtgagaggcagcagtagcaaacgcgtaggtcaacattccatcagcttattgttcttcgcctgtttggtgcgtttaggcaatgctattctttctctctgcaaggaatttagcaatgttattcgacaatatatagctcaaggactgtattttttttgcacaggataccagcttatattggcaaaccatgctcagtagcctgccagtttctgacagaaatactgaccaagaagccaaatcacatccttcatgcaaacaaagccagcagttttcgcatgaatttctttcaccttgcgcttgtgctactgccgctgagcttcatctgtcctcccgtcggttcatgcattgagcaggagaggctaaccctcctccggttcctcgcggagctgtcaccgccacatgataatggcctcgctgcgtcatggaggaataggaccgactgctgtacctgggaagggatcatctgtgatgtggatggtgcagtaaccaagatcttgctggcctcaagaggccttgaagggcgcatctcgtcatccctgagcgagctcaccagcttgtcgcggctcaacctgtcatacaactcactctccggtgggcttccgccagagctgatattctctggcagcatcgttgtcctcgatgtcagcttcaaccgcctcggcggggaactacaagaggtagactcatcatcatctgattggccactccaggtactgaatatctcaagtaatctgtttactggagcatttccatccaccacatgggagaaaatgagcaacctagtagcgatcaatgcaagcaacaacagcttcactgggcacataccttcctctttctgcatcagctcactatcctttgctgctcttgacctttgctacaaccaattcagtggcgaaatccccgctgggataggtaaatgctctgcacttagaatgctcaaagctggccacaacaacattagtggggccctcccggatgatctcttccatgccacatcattggagtacctctcttttcctaacaatggtttgcaaggaacaattaagcttgtgataaagctcagtaatctagtttttcttgatcttggggggaacagtttcagtggcaaggtcccagaatctataggcgagctcaagaaactggaggagcttcgcatggaccataactacatatctggggagctgccatcaaccttggccaattgcacaaatctagcagccatcgtcctcgtgagcaacaaattcacaggagaccttgctaaggttaacttctccaacctaccaaatctgaaaactttagatctttgcacgaattacttcaccggcacaattccagcaagtatctactcatgcagtaatttaacttggttgcggttatctttcaataagcttcacggtcagttgccagaggagacagaaaagttgaaatcccttacctttgtatctctttcgtacaactactttaccaatatcacaggtgcacttcatatactcaagagcttaaggaacctcactaccttgctaattgggggcaatttcatgcatgaaactattcacaggatgaaacaattcatggtcttgagaatcttcaggttcttggcataaatgattgtgcactgactggaaaaatacctagttggctctcaaagctaaaaaaattggaacttctacttttatacaacaatcaacttagtggaccaataccaacctggatcaagagcctaaactaccttaagtatgtagacttatccaataatagccttataggggaaataccaacatcactaacagagatgccaatgctaagatcagacaagattgcggatcactcaaacccaagactctttcggatgccagtttttgtggctccatctcttcagtaccatacggctaatgcattccctaaaatgttgaatctaggtaacaacaaattcagtggtgtgatccccatggagattggtcagttgaaagcgctcctctcactcaacttgagcttcaacaacttacatggggagatcccgcaatcggccagcaacctcaagaatctgatggtgctagacctgtcttccaaccatctgacaggtgcaatcccttcgtcactggcgaacttgcactttctttctaacttcaacatttcttacaatgaccttgaagggcctgtaccaactataggccagttcagcacatttccaacttccagttttgctgggaacccgaagctatgcagccctatgcttttgcaccgctgcaattcagcaggagcagctccagtctccacaatccccacaaagcagtacattgacaagtttgtcttcgcaattgcatttggcatgttctttggagtaggagtgctatatgatcaaattgttgtgtccagattctttggctaaaccagacaataatttgtgctggcttgtactgttgtacattacgcaatgggtcacagaattgaaataagcaaccaacagccgactttctaattaatataaccatctccaggattccaaccgtgtaggatatggtcgatgagtcggtggaaacatagtaaactgaaatcatagattccaactgtgtcatatggactatggtcgacgagtttgtggaagcatagtaaactgaaatcatagttaaaagaactgtgtccatattgtgtggggatgtcaatgcttaccgatataatctatactaaatactatatacggaatattttttctgcaatttgcaacaaggtatagttaattaggaaaaactgggtgatggttccttttttacttaaaataggacacttcttttttatataaaacgtcagtaacagcctgaccgattgaaaaaaaattacaattaattatggaaaattggggttacgttttctcattaaaatgagacacttctctatataaaacgttgataacgcactgaccgttcgaaaaaaaattgcaacaaggtgaccgtaaatctgcaactgacaactagatctctgcaaaactagagaacaaaaaaacatgtaagtggaaactaccgaagctcacacgagcacaatcccaagatcggtaaaacgaacatgatgattctttcacaagagctttgcagctagccttgattgatttacctcaggagaagagcgagcgagcatagcccacgaactcacaggagtcgcaggatgcgaccctcgggccttggccctgcgccgatccgatcccatcccatccgatcgccatgcctgccgagcgccgccgagcgccggccgcccgcttcctttcgttggacggtgggagcggcggctactggcgaggatgccggagttccaggagatcggcataggtgggccttcaacatgtgggcctaagcagtctgggctgggcaacgggtggacaagaatgaatgaagtgcattttgattccctacccagtggattcgtatccctgaagcgtaagaaatctttttcagaaattattttatggtgttttaacgctctcaactgaattttcatatatgatatgaacacgcttaagtaatgtcaagtatttttgaaatattttttcatatgatttctttgtgatgtttcattcgttggggcttaattatacagtggttgttgttgttgcagtcagtattttctaaatgttacatttttctccccttcaaaaaaaaatgttatatttttctaaaacattttagaaacttaattgaaacatttgagtaagtaatgaaacaattttttataggtagtgaaacaatttcatgtaatataatattttatcaaaacataatcaagtgagatcttattataaatatttaatcgcaacgagaataatggtttaatcaaattataaattagatgagtattaatagatgcatgtatgcaggctcggtgggagtgggacgctcaattttttctctaagcattgtccaaataatttattaaatcttatcttactacaaacttataacccactaaattctaaagctcaaaatgcaaagatgtaacatcatcgtcctcgactaataattattacatttaaacatcatgcaagcattctatatcaactataattttatattgaattttagagctttaaaatgcatgaatgttaaattatcatcctacataattcttatcatatcttactataaagttatcccccactaactccttaagcttaacatgcaaagataccacatcatcatccactaacaagatgtcacatcatcatccactaattaacaagataccacatcatcatccactaacaatcatcacatttaaacatcatgcaatcatgctatatctttatagtttttataatttaagagcttttcaaatacaaacatgtgaaattatcatccaacataattcatataatgtttcaatgtatatctttattatgttttatgatatcctatatacttatatagttcatcctcacttagttagtgcttaaatgattaatctatggtccaaattatctttctctttttttcctctaattaagttatatcatatcaattgtttttagcctttagatgattaatctacggtccaaactatctccctacttttcttcttccataaagtcataccatcttactttttacgtttgaatcaccattttacatactatttaaatttaaattatcatagaccacattaatttacttaatctgatgttatctagctatcttacacatttttttttattgttatcatactaaattcccacagcaatgcgcggggtttcacctagtattactataaagttataatccactaaattctaaagctctacatgcaaagatgacacatcatcctccactaataattgttatatttaaacatcatgcaagcatgctatattatctataattttataattattgaattttagagctttaaaatgcaagaatgttaaatcatcatcccacacattctatatagttcatcctcacttaggtaatattaattttctcttctctcattaagccatattatcttaattgtttttacccttagatgattaatttatggtccaaattatctctctctttttcttctctcataaagccatagtgccttacttttacattgaatcatcattctatatactatttaaatttaaattatcataaaccatatcaagttatgtaagcttatgttatcatacacatacttattattatcatagtaaactctcacagtaacgtggggggtttcaccttgtaatatgagaaaaatacagaaggtgtgacaacatcatccgcaagagaatgccatgcatgatttttcgatatggaaggaagagaaagaggatagaagaactccgtttaccagaaggtataatagacagcttaatcatgtataccattctaggtaaaatctatagaatcgaatcatcaatgatacatatctgttatttcagataactagcacaacctgttgtaaaaccactgttcatgcccttgctaactcagattttctgaaccaaaagaactagtgtagatagctaaaccaaaaaaaaaaaaaaagcgttaaagaatgtgttacatacttacattgctttgccacctttatttctttttatttacaaggcaggtggcaaaacgaaagaatattatgaacacaaaaacctacaatacaccactaacttacaaacaaaattgtccagcaatggttcgaatttgacgggtgtatcacaaggtttctgcaacgaacagaaaaacgatggttagatggttcacaaaatcttctgagaaagaactaacaaaaacaagactgaaaatctacaagatctgtgacaactatagcatatatatatacttgccaaggactgcacataacattgaaaatgtcggaattcttgatggcatgcagaaacacatgaaactacagaaactaaattataatatttcaatatgtatataaagcagcctaaatctcctttcttagcacattgggaaacaaataaaagtaccaaaagattatggtaccatttctcatttagtagtacaaggtgatgcaattctccagtttcaatatattattctattttctgcacgtcaatctgttacatgtttattttcagggaaaagaacaaaggtgcatcgctaatactagttcataaaccagaaggatagctgatgacaaacaaagagaagcccatgcaaactaatgtcagtgctaaatgtccatgtccttcataaaactcaatgaagaattgaagatacaggcttttgtctaaactctaatatcgaggaaatatgtataaaaacaaaaaaaaatcctgtgtgacgaagcaattcaactattcaagcaatacaattttgcaaaaggaaaacaaaaaaaaggcatcatgagttgctagtcacttaccctttctccttgtgttgcctgcagctgccttccctgccttctcctggtggcacaaatcagacaatgacaatggagtcagtggtggggaagaagcatcactgccctccctgctatgcttagcctccaagagcttattcacagtgatgatgggcgtcctctggctgttggaaggtatggagtagctccttgccaaggccgcaggcggcctaggcagcggcgacgccgttcttgacgccttcggggaggcacgggccggcgtcggcgcgcgcttcgacaccagagggccggagtagccgaccagaccagaaggccggacaggatccacattggctggaggcagcggcagcaggtggagctcgctgatcttcagcgacgatgctggtggcaccggtgacatctttggggaaaccttgggtgacacagacgacgacgacgcgtgccggacgtgcggcttggccgcaggcattgcaccagggtaagccatggtgggcgatggcctgtggtcagcctgagagaagggcttgccgcctgacccggccttgatcgggatcggacctgaccatgactccctcttcagcttcttcagatcatcggtgcttgatgatgacgacggcttggtagcggcgttgtgcatggcgccattgtagtcttttgtcagaggagacgagtgccacagattcgtcggggcatggggctttgtttcgaagaattgcgcggaatgatgcagcctgtgtgaacctgatggtacggggttgtcagcaccaactggggtagggagcctgtacgagtgtttggttgaggatggcctcatttgccgaagcctgtcagtttcatcaagcaaattgccagcaaaaagtggagctgaatgtgtagcgaactcgggcttcaattgcgggaacactatttcggcctctgcttgttttgcctcttcctgcttattatgagataccaatcagaatttcagaatataaatatatgtactagcattttgttaacttggtacaaaactggagatagaggggtagaggctggtgaaggtgcatcatacatatatatttttttcgcttgaataattgctctttgagtagtgatagatttgggtgtaaacactcatatcaaccaccacattgaaaaataatagtttttccaaactcagtgagtgcatcaaaataaaacgtagtgaaatttggataagagaaataactaactaacgaaatcatattagtcgacccagttagaacacttctaatatgagtattatggagtggcagcacacctgcttgttttctttgattggctttggtgaagtagtctgatcacttttatcaaactggacacaaaataaaagaacataaattagataaaaatataaaagacagatcatcagtattctcagtagaattttatgaataaaaatgaacagaaaataaagtgagcaaattccagagataatcagtgcaaactatagaaccttagtgagctgattagacaaagaaagcataaagagttgaagcttatgccagttcaaatgctaccattgatgctgatttataagatccatatattgtaaaaccaattaagaggaaaaagctgaaactaggctatatatgtatgaggtggttaagtagaagcactagatgagaggcagcagcattaaaagggctttttttattatttaatggaaatgttttacatccatggcctctgctgtaaggcacacaaacaaattaaaagacagtaaccaaatataaatggaacttacatccattgaacctctcgaagtaagaaaatcttggtctctatcgtttatttcatagtcgaaactcagttctccgtcatcactacaagaatcgtaagtactgtagccatcattgtcagaaccatcatcctctagaccgctgaagttatagtcaatgtgatgtttctcagatattgctttgacacgaggttcaagtgcttcgagacatttgagtcctttcctgaaaaaacttaactgaatatatatacagttaggttatgtggcactcaaatctcagggaaatagttaacagtttcattgagttacctgagcagcatgatggcgagcagcctgtgttaacaggctctggaattgcccttgctttaatgatttcaagcgaaatgtgaaaagtgctgaatcctcttggtattcaagaaaagaagcgtccagttgttctgtggagaatgattcggttttggaatgccttgaccctcctttgtcactataggatgccctcatggtttcatatgcgtccctgcagggaacagaataggattgttcaagatgcgtctcagtgagaaatgaccaaaaatgaaaatgaacttgaggtgtgtttgaaccttttcatgtcgcattgttgtttcatttcctgcgcaatgcaaacaaaatgtataagcatatcatgctacattgatgtaaacatattgtttttcctgtggttcacaggcaatcctaattaaccaactaatgagtagccaataaacaattggtataaagtggtagcagttgttgttttcaattataagaatacataactgagcaaagatttcagaggaaattttgtatatcaaacctctaaagtttgcagctccttaagaagagattcagatggggttgtgattgtgtggatgatatttgttcgctggatagccaatttaaaagcgtgtcagcaccaacagattgtaacgtggtaaaaaaatttaaataactataatgaattccaaattgttgttttaaaaattcacagtaacaacaaaagtaacttacgtatctatccgcagatttctgtagttcatattgggccttaccgagcatcatcaacactctgcctgaaggtaaaaaaataagcataaaaacgattacagtagtcaacaaaaggaaactttggactgaaggaagtacaagcatacatggttttcatagtggttagaatctagtaacgcgatgttttacaccatgaatttctatatggttaataatggacaactcaccactatcgtcgtcgtcgtcatttagcacaggttttgcaagtaagcaacttcccagttcctctaaagcctcagcaaactctgcacaatattacactatgatcaacttaagaaatgatgtatagacaaacatgctatcaactgttgacagaaaccatgttaagcattagaatttagaaacaggaggtaccatatacgccattcgttgtagcagctgctgctgaaatgaagccatcataacagttcctcatttcttccacatcctgagacaaacgcaaaaccatatttcagttatgaatgcaacaatgcaaaggaaatatttcccattaccaatagactagtactatttaattgctggccagcaataaattgtaggcagccacaatcctaagaaagggtagaagtaccaaatacagcaagctgaacccattagaaagcagaataaattataagctgcccagtaaaacatggatcacacagtcctcttagacatatatctgataaggcgaagtaaagggaaaaacagtttctgtcatatcactgtcattgaccaacagtagcagtaggctgttgagaacaacttctccagcttaatggcgcattacattgcaagtgcttctcagtgtcatcattcagatggcacaaaagatatcaagattagttgcattgcctgtcactctgtccaataattggtggaaagtcagaaattgcaactaagctggcgtacttcagaaactcctctctgttcatggttcaactcccaattcagcaccagagaccgacgcggaatcggaacggaatatctcgtgcgtgttcttggataagcgttcatactttatccagagttccagtcaagattacgtcgaacagctgaccgagattatattaaatataatcgattgctatcttcgcagcaactttctccgatggacgcgtcgtcctctcctatcgtagactttgaccagacatgacccgcgagcagaatggctcccgggcaaacacgtaaagggcaaaattgcagagaagttgcacgtcgttttcgtggaggttagcctaacaactactctactttgaacatccgatatactaatttaaacgaggctcctactgtttggatcagggtttcaaaaaccgccgggggcccggttaccgccacccggcggtacggcggttaccggcggtaaccgcggtaaccgcgcaaaaccgcgacaaatttacaaatcgaaatttgaattcaaaaattcgggcaaaccgcgcggtttggcgcggttaccgcacggtttgacgcggtaaccacgcggtttggcgcggttaccgcgcgatgtgtaatgggttgcacagtaacgggccggcccatttttttttctttttccaattttcaaatttattctccgttttgctctcaaatttgaataaatattactcttttttgagaaatttcttcaccataaaacactataaatcaagcactaccttcactattttttttgatttttttctttttttttaaatttttaaatttggatgaattttattaaaccgtaccgcgcggtacgggtaaccgtacccccgcggtacgggcggtaaccgcggtaaccgcgcggtttccggcggttattcacaccctggtttggattaaataaaagtttagtccttctgcacgcttgaatcaacacggggcaagttcaaagctttgattattctaaacgaccaccaatgaccatcagaaaataattaaaaacgaaaattgatggatcaatttctatttaaacagttcgagctctgttcctccagccgcattgaataaccaaaatactactagtagtaaaatcattttgagcatccacacctaatcaataaacgagtgcaccaaccaaagaacagcgcactccacctggaaaacaacgcggggggtggctaaaaatcgcaatttcgcatagggctcctcccaagatccgattttgacgccgatttgatcacagaaatcccaaaaaaaaaaaaaaaacaggagatagatgggaggaggagaggaagaaatcaataaatcaatcaattaatcaataagtcgatggactcgcgcacctgggcggcgtcggcgagctcgtcgagcttggccggcgtcggctgcggctgcggctgccgcgacttcctctccctgtgctgctggtggtggccgaagcccttcagcctcagcaacggcgacttcatcgatcgatctctcttccctctcccctctctgatcgattactcctcctgtctaacaatccttataattttgtggggattaagcttatctaatcttttgctttgggcggcgatggtggaaatcgcaagaaaagaaaagggccttgatttcgcctctctctctctctcttgatctttcgttgttcctctatgaaaggtagactaaaaatggagggagattttatagttatagctgctgctgcttcttttataactttagcctaatggaaagatatagtggggcccccatgcccttggttgaccaaagaaaaagaagattagacaaaaagcagtcttggatttgatatagtagtataataataattgtagactgactgagagaaagcttagcttagaccggcaaatagtagtagtggtagcatcaaggagattttgctacgaatttttcttgatttgggttggtttttcgtcggagaaaagattaattttctactgtatttgttgttcccctttgcttttgaatttgatgatgacatctcgtcagatactaacagcggctgatgatacagtgatacttacctaaattaacactgaaacctgtggattattattttggtttagtaactatactactcctactttttgtttcagtcataccatatgaactaaataatgtctcacgctttgctgcgagatatatattgtataatggagaaatgatgaaatcatttagattgaaatattataaaaatgatttgagaatggttatttagcatgtgtatgtttaattttagaataaaataaattataaatataattactatatacttacatgttgagctttacgtgtttactggattgacgtggcatgcttgcgtgtaggttttagaagtactaataaatacaatgattgcatgttgagatttaggtatttagtgggtattagctttatagaaagaagatattaacattgaaacctgtggattattattttggtttagttaattacttctactagtttttatttcaagaaaattgcatgtgtaccctgaaagtttacctaatcttttctattcttctgagatttgctcgttcccttccatacttctaaatttcagttttgaccccttctatacccttttcgttagttgaccgttaaattcctacaataatatccatttttccatttggtatcaagaaaatataattttataaagtatattgattgagtgtataaatttattgtatgcgactattttatttatgagtttattttgtgggatattatttaacaaaaataatattttagtttcgcctccgtgaaggaaaaacaaaaaaaaatatctatgacaaagtttatttttagaaataacaaatataatatattttttaccattaaaaactgtatatatagcatattttgttacagtagtacaatatttttataagataaatctatttatgttcgaaataaataataaaaaattatttttatgtcatatataaaaataaattatcataaatattatttatgactttgttatgcaagatattatttatgataatttatttttttcatacaagataaaaattatttttgtaaataatatctcacaaaataaactcataatagttgtatataataaatttttatactccatcaatataaatcataaatttatattttctcaataccaaagggcaaaatggaatttatggtaggaatttaacggtcaactaacggaagaggtatagaatggatccaaactgaaatttaggggtatgaaaaagaatgagcaaatctcatgggtatagaagagattggatgaacttttaaggtaaacaaggaattttctcttctatttcagtcataccatctactgttcattagttaataggtactcccttcatgctaaagtctaagttatactatttcttttatcttacctcatccctcatataacaaagactaataaattataggcatacatacaaaccaataaatatattaagagcaagtacaatagcatactataagctagctataagcatatgcagaaaaaaaaagagatgagagagaaaaaaagtgtgttgcaaatttacactcagctgcagtacggattttaagatgttgtgtttgtatgagagatggaaccaattatataatggcgtagtatatatttgtagtaacttttgtatgaatagtctattagattaactatagatgatttggagtagttagatatactatcaaacttgctctaagatgattacttgggcggtaaaatgaaaagacgatccattcatttaagtattagatgtataatgactaaaaaatatgtccctctcattaaataaaaacaatgcaacaaataaaataggataagacttttggatggagaaagtaacaacatattatctctaatacacgaacctaagtgattttatcttttgttaattcactctcgtactatctcgctctctctttgaacttaccttagaatttatatagaggttgttatctatacgaagggtggctcgtcatttctcttcttcagctaattatctaatgttctgtgagtgtgatatttttacaggcaacctatttgctatagggaatatatactatgcacacaagcttcctatgaatactccgtgcacatcaactaataaatatcacaaaaaattttaaaaaaaattgtacacatacttcaaatagtattaaacctacatgtgaaattttatcttcaaattcattatattttagccataataaaaaagacaagattctgacatatttttacccttaagactgtcagattttcacctttttttaggctaaagtataataaatttaaatatgagactttgtagatatgtgtaatactaatatgagtaaatgttcaacttctgctaaaatttttcgtggtattttttagttggtgtgcacaggaaggttatgtgtatttctggtagaatttttcgtagcatttgttagttggtgtgcacgaagtgtgcacggaaagtttgtgtgcataggatatgttccctctgttctatgcctctgtaactcacccttttttttttctttccagaaagtgtttaactttttttaattatggctgcgaatgttaggttgatggggtgtgatgccctggttgctcggatagatacgcgtgggtgcgtgcaagcgcaaccgatgaatcaatgaagtggcctcaccgtcaggtcgatcaggaagcacttgcaaaatggcaagggcaccgtgacatgattcatgaccacccaagttgagcgagacatgaccaccaagcaccaacccaaaccgaggccacctgtccactttttaatggtgttcttttttccccccgaaccttttcaaaatttgtttatttttttctgaaaaagagaactcagcatacttatttattaaaaaaatattgtaatgccactatttattgcgtgacaatgataaataaattttaggagattcttttttatgttgtatatactaaatagaagtagtttttttgcgggatatatactaaatagtttaaaacacataaaaataatcattgttttttttttattttggggatttcctattgtttgcagtttacataagggcatacgggtcttcttcttaaaagaatataacgtcaaactgggtaatttttttttttaaaaaaaagggtcaggaatactagcagaacagtagggaaaaagagaagcgcaagaattcgatggcaattaggacataatatattttgagtaaattatacctctatttagacataatgtttgactaataaggagaatatttcaattgttcatccaactcagcaagattactcatactgtgccgctttggccttaagttaatttgcatgtaccatacaactttgtataaattaatgaaatgaacgttttacaactttatgtattaaaataattatattcatcttacaaattcatttactatcagtgtaatttattcatatatttttaaggagtgacaaaaataaaggaaaatatattaacatatgcccatgtgtacatttgtaggcataagtttggttcgtcatgcatggtttcacgagattggtccattattaaatttactattattctagcccaagattatagtgaaaatgatgaattacacattgaattgtgttcttgttagaaagacaaacataaaataattggagaagcaacattagtgttgtggggattcactgtttgcttccatctatttgagagtgggcacatttggggaagtatgagagtgttgtggtgcgtgcatacgtcttatgcataataaaaaataaataaaataatgcggtgaatttatacgtttgttgataaagatggataaactagtactatatgctgcaacactttgtttggtacgtacgaatataaaagcactcatttcatttgacaaaaaaatacctagaatattgcaaaattaagctaggctatctaatagtttcgagattcgtactgctacagtgattctacattatcatctatcccccaacccccttggttctttcctaacgctctttggatgtcatctgataatgcctagcgcaccgctgacgcctccccacccaacacgtcatcgctcggtcgaaagacgtcaacagcgtcggcgaggcctcctgaccagcctcctcctcaatctagtagcagcgaaggcctatcaagtgattccttgctaccggatccgccatctaggccaccgcttcctaccacttctttgctttgcctccgccgccaacgtcgactcgaccaccgccttcttccatcctcatggctttgacaccgacgcctctcatagccatcgctttaaatccgacaatctccctctacataccttcctaccatcatgtcaatccggggtcatggtcaaaccctaactctgggtcgtcgtcggttgccaaactagagaaaaagtatctagggttaccggatcacgaattgcaaaacacacaaatcatgagtttagaaatttacagatattttagccccaataatcgcaaagagttgcgaagaacaatctgagatgatctcgctcgccatacagcactttgtttggaaggcacgaaacatgcacgctagtcatgcatgcctgggaagaaaggaccatatgctgatctgcttcgttggaccgtgttaattccaaacgaccagcggttgctcagccacgaagaaattaaaccatcatacgtaagctatgatatattggtactaattaaacgacctaattagtatatatacttcttctttcatatcatgtcaaatccttagttttttaaccagtcttccgagtaataagactttctagcaattctatatgaatgcgaccaatgctagaaagttttataatatgaaacgaccaatcctagaaagtttataatataaaacggaggaagcaattactcgatcccttgatctcctcgatccctcgttgtaagcgaataagcgattagcgatcaaggtcagacgtgcggggttttgaccgtggaccgaagaacggcccaacaggtttaatttcgccggtcaaacggtggttagctagcgtatacattactagtatgtacgtgcatacatgtctcggcgtacatacgtacgtcgtcgtcgcaagtgcagcgccgccacacacagtgtgaactaacctacgtaagagctgacctggatgcatgggtttctgtgacgcaacacgtgtcttgtctgtgtgccagttgtcaaaatcaaccttaagggtgtgtcctgtcgtatcggaagagaaagtatatactacggccctgtttagttcacactaaacttccctcaaactcctaacttttcatcacatcacatcacatccaaaactttcctacttacataaacttcccacttttttttccaatctaccaactttctccaaacttctcccaatttcagaaactaaaacacaacctacgtatcatattggaggttttagatatatagtctatagttcaaggtggcccttcatcatatatctggtgacggagaggcacaaagttcaaggttaattaagctaataagagcttaaatattttcacaaattacaaagtatttttcaagattataatggggattatgaagctaggtgtggggcccaagctatagctgccccatgcatgtttctgcccctgattatattgttaaatgtgccacttaggttaaagctactgtacatggcattccttctcaatgcacagtggtttgaaggggaaaaaaaccaccatgatgatttatggaagagaactactggcataaccactactacacaaactagataggtattggttgggaacctagcatagatgtcaaattttccaaccggcacaaaggtgctggctccaaaaccggcacctttgaggtccaaaaatacaaacaaagaaaaaagctcgtagctgccgtcttcaccccaaaaaaagcggctcaatgcatcggctcaaagcatcgagcagctccccttcacccgatatcacccaacatttaattcatagaattaatcggcatcaagaactacccaaagaacatcaactcaaacacaaaacacaaagaacatggagaggatggatgacggcctccatggagaggatggagcagcagacgagcagcacatcgggtcccatcttgcatagctcgtcggcggtggcgaagaagcagatcccacagcacgtccgaaggcgccacccgccaccgccgcctcccctcccgccgtcgcccacaatcgcacgtcgctattgtcgcctcccctcccaacggatctggcagaggggaggggcgccgcctgcctcccaccgtcacctcccctcccgacagatctggcggaggggagggcttcacccgccaccacacgccactgcgcctgagagagagagagagagagagaaagagagagagagagagatgggagaggatgcggtggagaggataaggacatacaagagataaggaggagaggatatggatgacaaggtgcggtgtggtgcggttcgactccgctcaatataggggtgtcggttcttctttataacaggcacctatagttacttaaaggtgtcagttttttgtgtttttagtctacggagatggaaaaaggtctacatatgtcggttttcgcacttcaggcacctatagcgccgatctctatgtgccttttttagtagtgaacacaactccctccacaatagcttacgcatcaagtagtcttttcaagttgcttaaaaaaccgtatgtgtttttcatgagacatgtgcgcctctagaggccactctttaggctaaggtggcgacttggcttcaacataaaggtgcggggtgacttaccatgtcaccacacaatgtaattgtgcttatgttatagggacgccctctttgtttaggctaaacttattagcttaggcttttaagttagcttatcggcttatgatttataccaatggatttaatatcctaagtttagtggtggagtcgtacatctaccttatataagccaaaaaagcttctccaacttaggttttggcttaatagtgttagagtggcttaatagtgttagagtggcttatggcttaaaaaaagccaaacgaaaaagctgcttatttgtttagtattagactttttagcttataagttaagccttaaaaaaagagagaatatttcaagagagtagaagagctaatttttctcacctttgaatgcgtggacccttttgggattttggcagcttctagtatctaatcatgcggtcacgaaaaacctttttatgaataccaaggtgtgcctcgagagttgagaggatgtgctaaggtgagcatccgttttaaggctttttcggtttctcggatgttcggtttctgtatagtagaaaatcacaatatatagttgtgagaaaaaatgttgctttggtggtttattgtcaaagaggagcatgtctacagctaagccgagccactcccaagtcccaacaataatcaagtgcacgaccaaggttggatacttggtgttatgccactcacaagacaaaaccgcgaaagctatgtgtgccctgtctacatcaagcaggtgaaagacatctactctaaagatttaatcttgcatggtgtcggtttcttcagtaagtttgattcacactagaaaaaaggacatacgactacaaactaaatactgagttacatgaaaatagaaactgaggaaccaatcgaaaaaccaaaactttggttcggcattccgttcgtggtttgtttttgcccacatctactgctaccaatatgcgtaagagatactttggtcgtttgacactctagcttgatgaagagttggatgaattgtttttgaattcgattcaaaattataaatataaaatttatatatgtataaaaatttatatgtgcaaactttatatacacataggtacaaaacatatatgtataaattgtataaacttttttatgtgtaaagttttatatatagtctctctattccaaaaagaatcaaatcctagaggaaaaagtataccgaaggtccctcaacttgtcatcgagttacaaaatccattcgctttaggtccttcggtggttttgaacccggttttatccgacgtgatggctgagtcagcgtggaactcacgagggccccacatgtcagtgtggccacatcatctctcttttcccctcttctctcccttcctcatctctctctctctcccccttctctgctctgcaaggcaggcaatgcctcggcggcgggcgtcggcagtgatggcggctatgggcaacgtggcggcggtggggggaggagctgttggcgggcggcgggtggccgagctagagcaggaggctgacgcggaggaagacgagtgtgcagcggccggtgacgcgaacgacggcggcggtgtggagcggctgaggcggcggctcgcggccgaggggaggtggagaaaggccacgctggaggagctggagaaggataggtgcgcggcggccgacgaggccgagctggagcaggaggctgacgcagaggaagacgaatgcgcggcagccggtgacacgaacagtggcggcgcagaggagggcgacaacgtggagcgactgaggcggcggctcacggccgaggggagatggagggaggtcgcactggaggagctagagaaggagaggcgcgcggcggcgtcagcggccgccgagctggagcaggaggccgacgcggaggaagatgagtgcgcgacggccagtgatgcgaatggcggtgacatggaggagggcggcagcgtggagcggctgaggcggcggtttgtgacagaggagagacggagggaggtcgcgttggagcctggaggagctagagaaggagaggcgcgcggtggcgtccgcggccgacgaggctgagctggagtaggaggtcgacacggacgaagacgagtgtacgacggccagtgacgtgaatggcggcgatgcggaggagggccgcagtgtggagcagttgaggcggtggctcgcggccgaggggaggcggagggaggtcgcgctggaggagctggagaaggagaggtgcacggcggcgacgcgcggccgacgagaccatggccaagatagcatgcctccgccgtccgcgcgccgcctgccgacatctccttcccccactgccgccgcgtcccccgtcatcgccatcaccgccgacgcacgccaccgaggctgccgatcttgcagagtagagaaggggggagagagacaaggaagagagaggctgatgaaccctgagctccactcgagacactcaaggctgttgttggcccgatctttcagtgagttgagataactacgatttgagagaaatattgacgacccgattacaaccgtactagacattgttgtcttgcgccttagcgatcgatacacctctccgtgggttgttgatcttgccggtgcagatcaacgttattcctgcaagcaaatcgaagaaacaagcaagaataagataaaaacaatctgaattgcagatatgaattgaatacaaatgataggttggggttctgtaacgagtaaatcggcgatataactgatcacgggattacacggcaaagtaacaaagctaaactttaatctaaataaaacccaagcaaccctgaaggggtatctagctacttataggggtgggagaacaaccaagaggatcctagggtcgtgctccaccagattggggcgcaccccacataggccccacttgggccggggtcccaaacgaaattacaaacccaaaggcccatgacaggtgatgcagcacattgtttcttcatctgcggatgacttggatggaatttggtgatgaggccggatccgttggaaagaggactccgagagctttccatcaagtattcatgggccgaaaacggaggtcgtatgtagattcggcggccatttgaagttagcagggtagcaggtggccgaatctgattccagcacttggaagacttgatcttaatatcatcttgttcttccatgatgtgagcaatggttatatctgtagtgaccatagtcacatcaaggggaaaatagagatgatgtggccacgctgacatgtgcgttccacgctgacttagccaccacgtcggataaaactgggttcaaaaccaccgaaggacctaaagcgaacggttttgtaagttgagggatgccatatatgttttataagttgagggatgtcatatattatctggttttacggttgggggatgatttcgtaactcgatggcaagttgagggaccttcggtgtaccttttccaatcctagctaccaatgtggatgaatgtatatattttgactgggccaacatgcatgttactagtgggctcaaggcccaggaaagaaagaagacacacctaggctgtgtgggcgcacgttgactcgctcttatcgcgtttagcaactcgcgcgttagacctccccccaaagaacttgactcttttccttcggaagtacaaactgataataaggaatgacaattgatttacttataattaaatgatgccaacccatagctaggattggatatgtatataattggtgcaaccgcgaataaatatgcaaatgtctaaattgaaccccgtcagatgatcgagtgacaaacatgaataaacagttcattactttagcgaaaatacagcggtttagatacatatatatggtatacaacaaggtagttgccttctctatgtacagagcagatcactcaagaacaatgcatagttctcatccatggaaacggtttggatatcaagagggtatgttcttacgcaggcacagcgaagctcggttcagaccagcgagttggatccacaacgaggcacggatccgacttcttgaactcagccacctgcagatcgagtgcattcaaaagaaagttgaaaaaaaaaactgaaagaaaaagctcaatgggagaacagcgtttggacaagacgatggcgaaccttttccccacagctggggcagtagtggtatttgtgccagaggcagtccatggaaggacaaaggaagcagacgcccatcatgaagggcatcatgcaagccacaactgatgctagacttggcttcgacctgttcaaagcaacaacagccatgagtgtgtttttttaagtaatgaagcttcacctaatgatatgtttggtatggtattggtgctactggtcttgaggtgtggagtaggaaatcataacacacaaatcgacagctacttacaactaaaataatgcactaagacccaaatttatagtatcaatatggggctcaggcttaactatggtgtgccagttcatttccctatcaggaaaataaatacaagaaatgtgttattcgtgcccattcttgcatcgccaactttagcatataaaaccattactcactactcagcagtcagcagtcaaatcttgcatcaccaagctgacacatgattttcggttcacaaaaaaatctgacaaattgtctcaatccatagctcatgcaaccattcagagttaactagaacagataatgcaggcaaatatttagatggtctttggttcttttcaaagcccaattcaaaactagtaacaaaactcatatagtgccacttcatcatatttagtggcaccatctgatttgcgcctcataaatgcaaatgcaattacgaacataataataataataaagggcagaccccactagaaaggtatactgcgcctctcttgtatatatggttgaaacaagtagactgtttttgatacagtttgtcttctaatacttgtttctatataatcccaaaaataacacctttcaaacataaagactaatatcgttcaccaaaagttgtttcagatgtaaggacttaatgcaacagacacttagcaatgtgggcagcaatattgccaggaaacatacgaaagacggtcatttaaaaacagagtaacactcaattcagatataaagctgattgcaaacaattccaagaatcatgcaagctcagatgagcttcagtaagccttagcacagccaattagatggtctcggcagcagttcaaaaacagaaaatgagcttagctcaagatgtaatttggttcctttttttcgcaatgctataaaaatatgctataatttggttcctacagtggcaggagatatatacctgtcaatagaggtacaataccttccaattaacataaaaaaaatacctctgccacacaatacctcccatggactgggaaaaaaattgtatcttcggacctgttcattgagtacagaggctactaaataacacaagtgacaagttagtggaagtagatggctaccatgttacaattcacaaacatccatatatatagatctaatctaaagtagtgaaagaattattctttctcgagtggaggatttgccacatcatcaaaagactaatggccgtcagatacagctttgaaacaaaatttaccgttggatatagagaccaacaaagaatcaaaaggtcaaaataaagaaggggttgtctggaggcttcaagaggcttccaggagaaaaggagagggaagagttccaccagcgatggaaacaaagcaatttgttggtggctctgagtaatcgatggcccaaacagaataatgggcttaattgaaccattataaattccttcctaatagcagccggaaagcagaaattccatcctcttttcttcatgtgactggagcttaaacagactgatgattatccattataccatgaaacccaactttaaaagaaaaatcaaaataaacttttctactaataaaatatgaattctattaaaatgaatcttcttctttcaaactgaaagacatttatacacttgataagttaaacatttattcaatttaagatgaaaaaataaaatgaaataaaatccatagtagttctttatcaagttcttcatataaaaattgaaattccgcacatatatccaatagacattactcatagaacttttacatacttgtcaatgtgggcatcaaagtcacgcaacgtgcgacaaagtggctagtatatatgactgccaatttctgttattgtgttttattacgatggtcatgttatatattagctaaactaggtgttacatgtcctaagtgcatgattaactctagcgctcgagactcttcattagaagaagaaagctaaatatgttcgtgtaacttttagcttccagtacaagctctgacatgttatttcaactgacctagaagggttcagaacacaaggaactcttcaaagtgttttctaccagatggaagaatgcctttcttctactctctccgtccctaaatataagggattttagttgggtgtgacacatcttagtacaacgaatctagtcaagctcttgtccagatttattgtactaggatgtgtcacatccaaccaaaatcccttatatttaggggcggagggagtagtatttgtaagttcatgttttcagataatggaatcttttattgaactcatccaattacatcaagatgatacaaaagcactggtaaggattatgttgtccaagcagacttaggcccttgatttgcatctgttgtaaaccttaaaatgggagagtaattacaagtttgtaactgatatactatgaacctattatattctcttcctcatatcatcagattcataatttaacaataactcaaattctcacctcccctatagaaactcaacttaacagaaagccaatcgtgaatgcgacttggataagagcaaacgaataacaagaaacagatgacatgaaaaacatggggaactccaccagggcttgagcttctctggtttcgacaacctagaaagtatcgatttcttcttctcccttttcacggtgcagattagactaccgaacaatctagtactcgttgcagatcaatacaccgaatgctggcaatctcgacctatcaaccgctcgaattccacatctatcccttcgaatcgcaggtaaaggccacaataaaaagactgcaggggggcgagtacggcgggttctcaccggagggaggagacggccgcggcgccgcaggcctggcagtggaatggcgcgggggtgtcgcggaacatggtctgctgcaggggcacccccttgggcgcgccggcgtagatcgcgttcggcgggggcatccccgccgcgtaggggtccggcgcgtagtagtaaccgccctgggcccccgccgccgccggatggtacgggatgccgatcgccggctcgtcgccggccggcgcggggaacgccgccttggccgccatggtggtggtggtcgtcgtcggtgacggcggttgggttgggttgggttggtttgaatcttgacttgtctcgccgcggctgtcaggttgtgggctggaagcctggaaacggagaagatatttatatgtgtatgcgtttgtacaaggtctgaaaaaaaaatattttcgttggaaaattttataggattttatgtgtaatcgttcgtaatactccataaaactcttctagaaaatgtagttagtcaaaaacgtaacaaagcaaatgttgaagataggagaaattacgagaccttgtttattaccggcgcattccacacaatcgggctttttttttctaaaaatgctcgaaattactttaatccgggcgactggcgcaggggagcccgatctggcgctcccccgcgtgcccctcccccctccacatgcgtgaatgcaggccctaggtcccaccgcatcctctactttcacctgccattgaaaaaaatcctttggatacctcctattaagggaatttgttttattttttccaccaaaaatatttcatctagtgtattcacaatatttcactatgtatagttctaatgttacaaactgaaatactccattgcaaccaaaaaaacccacatattttggaaaccccctattaagggatttcattttattttttattccaccgaaaaatatttcacctagtgtacttataatatttcactatgtatggatcaaatattatagtgaactgaaatattctttcgctatttgctgaaacattgtttttatataaggtgaaacaacaccagatttaaacgggtgaaacattttcgatctacttagtgaaacaattccgatatacctggtgaaacatcgtgcaacatttaaaaaaaatcaataataagctattttttttcatcggaatatatccatatgtggccttgttttgaagatttaattgcaacgaatttaatggtgcaatcggatcatgatttagataaataatttaagagaaaaatcagtttaaaatagttttgcacgtaaaacaggtgctaacgtcagcgtccgatttttcgaagatttggatcgggcgaccaatccctagtcacctccagaaatgctacacatcacacgtataattttagaagagaaatcatatgaatttctagccttcaattcgcttaagccatgtcgagacggccaccttggcatggccaagagtcgaccggcctggcctatttcacgacagtcattctaatcgactttagatgaaattcaatgtttgtaatgttcatcaaagatgatataaggccatttccaacccaataactaggatagtgtccataacattaaataaactgctacctaaaatgaaaaatgatgtggcaaataaataaatgagaaaagataatgaaaccatgtctcgcatgagatatggtttctacacaacatttaagacattatgtgagataagtaacattaaatttaagtatggaatagtggtgtttgcattaaaagagtaatgtcagtttatgaaaactatgttagtgtcttgtgttggaaatagcctaagacatcaaatgagtccgctcactaaaggagtgctggtcgttgggaccacgtgtccaggcttggcccggcccatcctatttgcctggccgacctgcgcgccctttttccacaattatattatctagatacgacgatacagatacggatacgccatcttcctaataataaagatacggggatacgcgtatatatatataaataaaaataaaaaaaataaatcgtaaactaggcaattagcaatttagcatagcagagcatgccaacaccaagtcaccaaccattagattcatctcaccaaaatacaaataatataaggctaaaccagtgcatatgtaagtgcaagatttcaaatagtacgcaaatcacaaattaatagttcatcaacatgcatagtttcacacatcacaaccagttcacagagacggtagataacatcaacatcatcatagagctaattcaaatagaattgtttaggacttcaaatacaactcaataaatcaattgctgctttcatccattgtaactgaagtggctgaagcgccattatcatcttgtatatccaatgcaccaagatcttctagcactctctcaagatttggctcatcaagtgacagtgttgggccctctctaggcagcacccgacagtgctgcgccctctggaggcggtggcgctgtgcccagcggatggcgccgctgctaggcgatggcaaacagcggaggcacggcggtggacggaggaggtgcgacgcggcggcggcggggaatggcagtggcggaggatggtggcggtgctgtgctacgacgcaaggaagagagcgagctgagttggggttggggaagcagcgccgttgatgttctttggcttgctcagtgttcgatggttttgatcgatgattttagggttagaacgtatcgcgaccgtatcgggaattttttttattatctgaaaatcgtgaaaacaaccgatacgtacgagatacgtatcggggcatatccgatacttatccatatccgatatgaatacgtggcctgggaggcgtatccaggtaacatagccccacgacacccctctcgtgttagaagctccactttgtttatttttatttgctagaatgtcaggaatagtatactctagtttgtagaggagttcggttgggaatcggcaagattttgaaggaatgtctttgggacttcagtagtgattcttgtatcttacaagttatacatttaggctaacatatatttgctttatattttttagtatttattttccgcaattacattcactctttatttatgttacagagtatttctctaatcaacggattggtcactcatcatgtggaataaactagaagtctgtggtgtagagtttgcaggtttcttggttggatttagttcacctagctggatttgagagtgctctcttctaaccagcgggagtattttacgagtatacgacctagtccgctagatgtggtgccttggatgtatagttcaaggaaagggtagttagaaaaattgatggatgtaatcgtacaggtggtgatagcccaaggcgtccttaatagtcgtccacgttagttctagtgtgttggtgttagacatcaagaagggaaattccttgatagtgagaacatgcgccctgtgccttattagtacaagccatgctgagattttctcatgctgaaatacatctactccttagtctcctttgaaactcctaaattggataggttgggtccctaagtgtcatctgtagtttaacttcagtcatatcttttattagatcttacccccatctctaattagtgtagatttccttacacaagcaacatagaatgaagaaaacattttgtgccagcagtgtgtcctttggaaaatataaatacaataccctagaatactccgagataaagtactatattgataattccatgcacgtgcggaactattttgtgagagcataagaaattcaacaagcactttttcgcgtcgttgctaagaacgcaattggataaaactttcattctttgtacattgtcttgatgagtggaagtttattacttttctaagcgggtttgcatttcctcatgttttttgttgatctgaagacatgacatgtttatggtcaattttgatctcccaaaaaattgtcaaagttatcatgagttgttcatgaataagtgaaaaatatcattatcataaacacatctcatcatcataggccaaatcataggagaatatcctgttagttcttccttcaccgcctctaactcagcctccacggatcattatggccgagaggaaaattcaggactattccgatcctgttagcaaagtcccgcaaaggccgaccatcaatgtcaaggcagagaattttaagccaaagctgatgtttattgatatagggcatatttggcagggctccaactcctaaatttaactccaagagctaggtctagagtggagttgtggaacagccaaaatccagctcctccttcaagtttattttctgaaagcactccagctagctccactcccattttggatggagctgaaactgttttggctagctctatcaaacatgcccatagttgctcatagttcatgatgtgaccatgcctactgtgcatatatataaccattattcacattatgggttaactgaaggcattgagatcaactcgcccaaattctggaatccaaattgaccgcctctaacagcgttgatttcaaacagccactaaatgtgcatacgagctccattttgagtccatgagtacttggtgaaaagctcttgaagtactctttccaacgtatctagccccatctccaaattccaaatgaatcatccgcaattgaataaacaaggtgtggcaccacctgtcatgggcctttgggtttgtagcttcgtttggggccccagctcaagtcctcccacctctgtaaatagctatgtacccctttagtgtttctcaggttttgtttagattaaagtttagccattggtactttttcgggtaaagtcatgatcggttagatcgttgttttctcattacggaaccccaacttatcgtgtgtgtattcaattcatatttgtaatgtcagattgcatttatattgttcttgtttgtttcttcgatttgcttgtaggaatagggtcaatctgcagcagcaaaatcaacaatccacggatagatgtatcaatcgctaaggcacagcacaacaacgtctcgtacggttgtagtcggatcatcagcgtttctcccaaatcgaagtattatcatcaactcaccaaaagtcgggcctatcagagtcgtgagcatatcaagtgaagctcagggttttatcaatccattatgtagcaaaccattagtaatatggttgctcataatccattctatagcaaacctttgaagatgcaacggacacctccaacagttcttaaaggtttgcaacaccttcgcctattccccattctctggttgagaaggcaaagtggtgttctatccatttgatcaagaggctatctttatatggatgagatgctccaatatatttctttctatatacttgtccaccaaaaagccaaccgcactgtggaacaaaagattgggatttcaacagttgtatgatgagtcaattcccgatgcatgggagaatttccaatagtgcatccaagcctgcccgcatcacgacatggaacaccggcttctcatccagagtttctacaatgtggtagtgcatccacaacgtgggaactgttgtatttcttaatgtcacagataaattccgcaagtgcacggagaataccgatgtagcacttcaccgggagtattccaaggtattgaattcatagggaacgtgtgtgttcagctcctcgtcaggttcatccaaggacacgaagcagttgtaggcaaaggatagagaggatttttctagtgagaagcagtgtctacggaaagcttagtttaattctaacgtggtactttaggcactagctagttcgctgctaccagatgtcgctctactccgtacccggacagggaggacttaaagtgattctgagggctgttaccacctctacatccacctctaatgtactgtggggtacgtagcaaccactgaaaattaactacctaaacaccacgtttaagcaattaataactactctagtgtttataacttactaaagcaataactatattttaatggactatagtgaacaatgatcccatatgctgttaggaactaaccaagaataattctcacaaagtaaattgtaattaatcggaaagatatttctattgaactagagtaattaacaaggtacaaaaataaggataggattaccgacaactcctgaattcctctggcttcttctaccttactctctccccattctagtatacaataaagtacaatagagtctcttataattctgctcaagcttggagtgtgtgtgtgtaaagtgaaggagttaggtccttaaataggttggtatgatggttatagatatgcgaaatgtccaaaattccccgcaaccgccatcaagagagcatctggagcgtccatgccaaaccccagaaccaatggtggagatcagggttcggggcttggcccaactagcccaggatttggcctgggcctcctcctcagcttcctttatacatttctctggtagttgggctcaatttctggtgtttcgatggagtttaggagcccaactcttatgtggatataattccccttaattttagtctagatttcctcctaactttggcggtttattacctgcatctaaatatacaccaacactcgtggaatatgttagaattaagccctaccactatgttggatgttttattatctaagttttatgcaagtattggcggcataaaatcggcattcaacaggcgccaacaggaacctcgacatagatgcgggaggcaccatcttctcactttatatcaatgttgcccaagcgttgatcgagaagatggctgcccaccaaggttgaggcaaggagcataatagtactagccctaggccaccaccgctgccatcttggtcgccatggtggtcgtcggtgggcgatggtaggttagttggttggtatggtttgaatcttgactcatttcgcaatggctgtcaggtgggctagaagcctagaattgagtgacaagatatttatgtatatgttgtcaatgttagaaagtatgacgctcatctagaaaacattttttaaagtaccattacctccatcataaaataaaaaaagaacttctaggattggacacgggtactgaggaagtaaggatattaattgagtgaatgttgaggttagatgagaaaagaaagtaggtgaagaatttgaatgtcagaactttgaatctgtatgttaaattgcaacttattttcattcatttgtatccatttttactgttaacatgtcacgaactccctatgttaacaaatataaacactctaaggatttaaaattaatttgtttcaaaatattaggattcttatagtactggtattttttttacttaaagtattgccagggctttgcctcgcagtgtaattttcatttaaaacaaaaatatttacaaattacaaggaagaaagaatagaaaaacattaggaattacaaaagttataaccgataaaaaaactatatgttttaaagggtccattctgcacatatgcagaagaacttctttcttgaacaggattctccatgatccaaaggaaggttgctcatttcgaaaatttttcccattcctttgcttccagatatgctaggcagcaacaaagaaaaatttcatgaaacctttttgcctaaactgcaggcgtgccgatacaatcatttgaaaaaaagttgagattggatcccacagaatgcccaaatactgctaacttctctgactgaatggacaaaagaggaaaacatgctctcttgtttccctaagattattaacacgaagttcacaagtgaagtcatcgttctcctttgtatagtgatgacgatcaagcatatctctggtgttcaatctatcattgaaaagaagccagacaaagactttttatcttcaaaacacatcgtattttccatatccaaacaaaaggtctaggtgtttgcacagtcatgaaagtgagcttgtaaaacttattagcagtgtatctatcagaattccatagaaaactccagtcatctcccttgctatcttgtaaattaagaaaggaaatctcttcctccaaattgagaaattcttcataagattgacttcttaaagccaaagggaaacaatcttccaaaggatgagaggacagctgctgcacggactactttttatccaaggccacactaaacagatttgagaaagtcaaacacctaacctcttcattccaaggatcatcccagaaaagagctgaagaacctgttctgacagtacatcttgaaattcctctgaaaatgtctgacaaagcaataatatctcgccaccagaaagagcctttattccaaatcatatgaggcaccttaatgccatagtaagaattccagattaattgaacccaaggcagatcttctcctttgtaaaacttcacaagatgcttcagtaaaagagctgtgttctgaactctcaaattaataattcccaaacctcctttcacctttggtctacacaccatttcccatgaagcaagggattttctagatgagcttgggttgtttcccctccatagacaatttttccttgcagtatcaatagctttggctacagaaacagacaactgtagggaacacatgtaataagttgggattgaagataagacatagataattaaagtgagcattccaccctgtggcaaaaaaaagagaactagctatcaatcttctctcaactctgtcgaccaaaggagcaaagtccacaactcttggcctagttgttcccatgggcaaacccaagtgggtgaaaggcattgtaccaatagagcacccaagtaagccaacaaagagcttagcattctcttgggggagattgattggatataagctcgaattatgataatgatagttcaccttgagtccaattgactgagcaaaagagttaagcaaagctttgaaacaaaatacttccctctaagatgctttaagaagaaccaaagtatcatcagcatactgaatcacaggaaaacccttgccatcttgttcattaattggtttggacagcagacgcagagaaaaggctctgttgataactctttgcaacagcttagcaccaagaacaaaaagcaagggggaaagggggtccccctgtctaactcctctcctacatttgaaagaatttccaggaacaccattgagcagaacagaagtatgagatggagaaaacaccatctgaacccattgcaaccacttgttattgaaacccatgctttgcatgatagaaaggagcacagagtgctcaatagaatcaaaggccttttcaaaatcaagcttcagcaggattatctccctcttggattgatgacactgatgaatatattcaaaagaccatgctaagcaatcttgtattgttttgcctctaataaaaccatattggttttcatgaacaagcttgagcataataccctggagacgatttgccatcaatttaattaaaattttcaaactgacccccaccagagagataggcctaaagtcattcacagtttctggaaggattttcttaggcactaaagtaatgtaagagctgttaagaggctgcaaatcagtagaaaaaagcatggaaatgggctgccagcctgtagaaatcttgagaaatgataggctaatatttctttagaaagaacccattaaacccatctgaaccaggggccttctctaggggaattatcttaattaagttgtcaacctcttgggtagagaactgatctaccagacaatccaaattaattggataagggattaaaggccattgagggagaagaagagatccccattctgttcttaaagctttggaagaaaagacttgccttttggtcatgcaaagaaaccacttgaccagattgatcataaatctgagagatggaattcaatctaaatctttttgtggcaatagactggaagaatttagtgttctcctctcctaacaacatccatctgtttgtacatctttttttttccagtatagcttcttgaattctagaagctttatcgtctgcaacttgataatctctttgaaattccattaatatatacccaagggcctttgttcctctatcaagtccaaaaagttcaacacattattacagttaactagaagagtagttaactttgacaaatttttactccacttcaacagacttttccttaaaaattttagcttaaaactgatgcacttagctggattatcaaaaccaggatccacagacaaaaccctgctgacaagatcagaaaatccctccatttcaaccccaatgttttcaaatctaaagattgggtactttggaattcttgtatcaattttaacagcatagggaacatggtcagaaatatttcaagcaagaggaagcacagtatttgtctcaccaatcactctcccatcaccaaccgtataaccctcatttaatgtggagcatcaacattttttttttcattttccttagtctctccgaaaagtatctagaaatactttttatatttgtggatgaaggaactattgtattatattgttttattcaacatggacagatttcccattttctccccagacaagctataagtaaagaaaagattgttggcttcggttgacaaaaaaaataaacaatgcaacggaaaatgattttagggtaggattttgtatattcattttcttagtggtaaaaaaaccaaggctgaagaaaagagaaaatgatgaaaaatagtctagaatcatttaaaattaagtttggatttaaattttaattagttacggcaacaagctccaagcgatgagagcacatcttttttcttcctcatgtgctcttaggatagatcttttgattgcttgaacgacaagatttcccagcgcagttagttaaaattggatttgttataaaactcttagatcctatttacatttatggaattatattttgtaacaataaatattaaaaataggattggatttcatatacaaaccattttcttctgtttctataggtagtattaaaactacaactattgcaattaagctacaccattataatttgatatcaccacgatctaagtgttttttctaattaatatgttcatttctaggccttcatatatagtacgtgaatatgatggcttttcgagctcttgcagatagattatatgggcagccagagagatccataggtgtagactcacttttaagttgtacacgggccaaaatagtctaggttggcctaggccttataggactggatccaacaccgtacgcactctccctttttgcaagaactgacatgatacatgggctgtaaaccaaacttttttaaaaaaactaaaaacaacggcggaacctaacggcgaacatcaatgtcgagatgctgaaaaggcagcacaaagctttgactttgacttcacgaggcacgtgtcatcgttgcggagcttgccgcccagcgacccagcagcttcgactccaaggcgatcccgccattggtgtcaaaggcacgtggagtcgttttgccgtgaaccatggttcacggcgatcccgccatcgttttgtctgcccatgtacgccgtcctcctcgcacgtcgccacatccgccgcctcttccgcgctcctcgttgggcgctgcgcctccttcccgtcaccaccgggtgaggcgcctgatccagccatgcggggaccggatccagtcctaccgctcgagcagcagcaaggtggagggaaggagaggaagagtttggcagcggcgtgcttgcttgatcgccgcccgtgccgccctggggctgagcggaacgagggccctctgttcggagacctcagagctgaagctagcaaactataacaatactttgagatgggtatcgttagaagttctcaaattctattagtctttgatatcagcctcaaggcatcaaggatttgcaggggtatctcaggagcagcgaggcatgctgccaaggctcctggctggcctatggcgagagccgagagggggccttttcttcaggtgttgtgggttcacacgagagagatatatatagaaacatgccgtcatgttttttttttaacgactcgcactagacggtgtgaaattctattgatagagcagaaaaaaattacaagattacaaccttgcaaggtcgtaaccagaaaaaaagaaaattataccaccacccacacaccgacagcgccaacacacagatccaggagaaggctaacaccggatcggccgccgctaagcgtgaccgaccgccgctaggccaacaacagaacactgccgagatcacccaaaatccgacccatacaatcaacacaaagccaactctatccaagacttcaggattcagggagagagggtgagagagaagatggaacttgtagaaactaggacgccgccacaagaggatgagaatctagagtgtgcttgcaccaattgctcggggggtttcggcaaggggatgcctagacgacgtctccaacgagagaagcgacggaacaccaccaccgccatccgtcaaggtctcaaagagaaccaagactaagctttcactcggcagccatccttgaggggcgagacggcacgacaacgccctcaggaggggaatgacactcgaacgtcatcgttgcctgtccggccaaggccgggctgggttttcacccgccgtccaccacctgtcgatctaccacacatgtaccattgctccaccgccatccaaaacctccgccggagcgtgggcaccactgcaccggcgccccccaccggccagtctccgcgcgctgccaccggtcgtgcctcaccgggccactggcctctcctcccgccgcatcggccactgcctccacgccgggcagcctcgtcgcgtcgcaccggcacctcgaccgcacctccacgcaccagggccgcctccgccgccacctgccgagcctcactggcctctgctctcgccagtcgcacctcgtgcacgtgctgccagccagccgacgctcctcctcccgccagcgccgcaccagccatgtggatgtcatctatttgaacattatattacgggtctagattaaggcgtagcctcattattctccttaatggtgatggtgattgataaatctatcgtcacccatatcacgagaacgtgggttactagacagtgagatactccctacgtaataattataagtaagtcgtttgggataatatttaagtcaaatattagaaatataaatcatgaatatttctcaagttgttgagtttgaaaatataaaagttatatgaatagatttgttttgaaaaatactttcataaaagtatacatatatccatttttaataaatatttttatataaacaagaagttaaaattgtattttagagaccatgtcgctatacaaaacaacttcctttacgagtatagagtgagtacgtggacttttgactgttccctgatcctaagttataaaacaagaaaattttattttaacgtgggtataaaatgatgacagctatgacataaagatatttttatggcgattattttattttatttttttgagactttaaagtgtacaattggattctatttttggaattgctcgacaattgtgacaattttttcgcaaaaaaaaactttcacatttctagccattggatctcctcgagattcatgcaaactttctcatttctaataaccattggatctcctcaagattcgtgcagagctgcaaaaaattcagtcgcgcgcatgagtcagagtggagtcgaacccacatcctgttgaacacatgcttgcttgatttgttaaccatctcacctcacacatttttcatctagttacattaagtaagctatagtgtagtcataatataattgcacttaattatactaaagttatttttcaaagttttcatcaaaataccgtcgaatgttctatatagctgctcccttctaattgtttttttttcgaaaattctcattgcaaagtaggggtattgagctagtttaccaaaggtataaaatgatcgtagtagatggccacccaggggcatgcaaggagtactcctttcatcctataaaatgacaagctattatctctattcagatttatagtattaacatatgttatatttagtattaggttggttttttaataaaatgtggaattaggatacttcttaaactactgctacgtggcaattgggaggaaacctttttttgggggcatggtgagtccaaggctaaacacctccggtcaaagcagagagcacacacacatgcattataggccagaacctagctagatagagtacgtagagagagaaagtatggctgtgtgtttagttaagcgcaaagtttgaattttgattgaaattggagatgatgtggctaaaaagttatgtatatgacagattgatgtgataaaaaatgactgaagtttggatcttaaacactaaacacagcctatgtgtcgtctcacatagagagagctggcatggcaatggcacaagtgccaggccagctgcgtggtggggcccgtggtccatgcagggagggagctaggtaggtagccagcgtgattcgattcctacaactatacagggctcgcgagagacagccgggacgacagtgaaagaagcttaataagctggacatgcaaacagtgcaggccgggccttagttcagctcatcaaggccctgaatcataaggccatgatgccatattgcccccccccccacccccccaccactttccatgtttagctggatgcttgcgtaccatatgccatgccatgccatttcacaagcacaagcaactgcatgctaactgctgtaaaattgagatcaatataattaagcttattcctgtaaaattgagttcgtgccaaattcatatggttgacttagcgctgcactactgaccattcagcccgggtcctacttggggagctttcggtagtagttcctcacagaataaaaactcctccaacaattcggtttttcttttagattctgagaagctgtagttgtagaaataaaaaaaaactactacttccgttttaggttataagactttctactattgctcatattcgtatagatgttaatgaatttagacacatatttttttttatatctagattcattaacatttatatgaatatgggtaatgctagaaagtcatataacctgaaacggaggtagtagaagtcaggaactggttgttccagtttcttcagattcttgctaaccggatatattactaccagctgcttatcagaaactaaagctcagatccccaaatagaccatatgcgttgcatgcgcacatgtatactctgataaaagcatgtacatacatttgatggcagatgaagcggcagcccaatgtgcatgcacagtatatatgcatcaggctgttcaatctttcactgtaggtaacgtacgtacgtgatctatatatcgtgtccggccggctcagcatgcatgcagggctgggccggacggcaaccaaacacaagaccaacctagctagctagctgctagtctatcatctactccctccatcccacaaaaaaaagacaaacctgagtttttgtgtttaattctgactgtccgtcttatatgaaattttttcataattcgtattttcattgttgttagatgataaaacatgattaatattttatgcgtgacttgtctttttaatttttttcataatttttttaaataagatgaacggtcaaatgttgagcacggaaacaaggtttttttttttttgacagatggagtacttcacattcgtggttaatttgctgcaatatataatgtgtgggccttaatttgcttgaaatctcgatcgattgatagatcatagatctgcaaacattaattgtttgttagggcctagctagcgaccgactttcccatgcagagcttgcaacaactcatcacacatctcatgcacaaacaaaatgtacgtacgtccatgcaagctattctctctccatcttaaaatataagcatttttagaatagtatcaagttaaacatttttaattttgatattaatagtaaaaaaataaaaaagatcaatcatttaaaattaatgttactaaatttatcattaaacaaactatcataatatgtaattctttttatttaaaatgtcttattttttatagatattgttagtcaaagtagcatatcaaaaactatgtcaaaatttaaaaatacttatattttgatacggagggagtagctagctgtccaaggtgtgttgttggctggacacctctctaattaacatgctaacatgtacacttgtagggcacagtttgagtcaatgatcaagagggaaaaagtgtgtgtggcactgtatttgcataggaggatctataaaataaatatatataattgggatcactgatgaaatttggaggtgataatcgatttgggacaattcgggtgaaagtgcattaatcctcctagtgggttttggtgattaatgacaaatgtggttaagtgactaatgagttcattaagtaactttcaggtgcattagtccaatgtgtgaaagatggatgcttggagaccccccccccccaaaaaagtacaaaatcaaagcggaccggaacttgagaagtgcataggatagtttatctattgaaatcaagtttttaggaaaaaccatactattaagaggggttctaggtgatgctctgatatatgtcaagtgctcttagtataaaccaagtgtcaagtttccctaagagtaatttttgcaaatactccatatgtccaaaagtgcaagtccggaacttcctgtcttccaggtccgaaagttccggtcttgtgaaaaatattttcctaagtgtagtccggaagttcctgtcttccagatccggaacttcctgtctagtttccagtttaaaattgtgagtaacggctagatgacgtcacctagccgttatacatatacagctcgtttccagcttgttctttggccattccactttcacttttcgaacctagagctgttgctagcctctcccaagtgtttattgccttctccgctcaatctagagcctaattcttgtgagaaagagagattgagagggagagaagaagatttggagaggtgtgaagactaggatcttgggtgagcacttggagtatctcgtgggctgtcatctcggtgcttattactcttggagatgatctcctagacggttagtgtcgcccgcgagaatccgttgcatattgtggatgtcccgggtaagtttgtgaaggatctcctctcctccgaaagggaacaaggtaagttaatgaagttcttatgctgagattctagaggttttccaagtagagcaacctacacttgtgacgaatttctagaagtaggttgagttggatcttggtggtcactcaattctagaaatttgcctaggggtgtttgtggttgaaggctgtggatttcctctagggtttttgcacaagtaaggcaaggggttaattgagacctagctctttggagctcctcaacagagagtaggatcgcaagatccaaacttcaggaaaaaaaccgctcttgtctctttctgtgatgtttctatggatgattctgtgatatatctcctgcttagaatacctgtgcatcatcttgagacgattggcttagtctcctgtttcgaaatttgaatttcatctttcatctgtaacccggaagttcctgtcctaagaacaccagaagttccgggcctggcaggccggaagtttcggagttccttaccaggaagttccgggtctgtttgaattttaccgctgtgatttgtttataagtttttagggacagcctattcacccccccccctctaggcttcatcagtgcgttcatcggggatgattgatttgagatctgtggacgggaatggagtgaaatcaatatattacaaacaatgaagaaaagaaaaaaaaataaaggagcaaccggatctagcccggctccatctttagtcctaaaaagggcttcatctttagtcccggttggtaacgtcaaccgggactaaagatagatttttactcctgattatttcacccgggactaaagatagcgatttttagtctcggattcgtagtcagggtgttactaaccgagagtaaaaaaccacttctccaccggtgaaatatatgatggtgtcaatgcctgatcacaagagaaatttcttcattctgtaccgtacttttagggtgattggtagagagtcagtcattagttcgttcatctgactccgaatgcatacatgcatgcaggatccactatgtatatatatttgtttcaattaacgaataacaactagtaatttattactccctcccgtcactattatttatcatttccaacaatgaaatgatgccaagtgtaagttcgttttgctgtctgaaacgtcatttatttccgtccgaagggagtagtacatgcatgtttgatataaatgccacgtgctaaactgctaaggcctttcacagtgccacgatgtggtgagttacctcgttgctgaacaccgaccgacgtggaggagaaaggaggtgggtcccgtgccttgcaaggttttgcccctcatatagctagggtctgggtttctcacgcccgaaaaagaaagtgcgatgcggtcccctctctgctgctcctccgaaatcctccccattcttccccccaacccgcgcttccaggccaagatccgagtgggcttggagctcgccggtgacactgccgagtgccgacgagaaatgggacattacaaaaaaaatcaaatagatgtcgtcactataggtgccggtagtgctaaaaccggcatctataggctttttcccacctttgtaggttgaaatcgcaaaaaaaaaggcacctttaagtaattataggtgtcggttctaaaataaaaatcagcatctattatactttgtgtcggttttctaaaaaacagcacatttaatatattataggtgtcgattaattaaaaactgacacctataatatattataggtgctgttttttttaaaaaaaaccaacacctatgtaaatcgagccgagctggccggcatcggatgagccgaccggtgcgccccaccacgacgagacgagcattggataaggttcgatcgtctcgctctctcccttctctctcgtcacgctctcttcttctcgtctcgctctcttctctctcccccgcactgctagcgactagctggcggaggcggtagcggcgaccgcgccctcccctccgccagatccggcgggaggggaggcggcggcggcggcggtagaaggggaggtggctgcggcggcaagtggcatggctcatgggcggcagcagcagcgacctcccctccgccagatccggcgggagaggaggcagcggcggcggtggagccctcccctccgccagatacggcggggggtaggcagcggcaacgacggcggcgggcccctcacaggcgacggtgagcacccccaaccgtctccttcgcttgcggctgcctgattcaaatgtttgattcagtgattcaatgatgtttgatgtgagatgaatattgccagatttgtttatgagatgaatgttgcatgattcaaatgtttgattcactgattcaaatgtgattcagtgatttattttgtgagatgaatgttgccaaaaaatttttgttgcggatgtgggaggggggactgctcggctcgatgcgtcggctcgatcgatggagccgatgcatcgagccggcttttttttattctacgaacctaaaagatgccggttctacacctttttgatttccaatcagtgccgcctcccttgtgccggttgggaaaaccggcacagaatacctattctgtagtagtgggagaagccgaaagatcagaaaaagcggagggaaaaagagatagataaccagcatactccatgcggcggcggccggagagctcgccggctacaactcggggggagcgccgcctctcgatctgcgctacccaaagctcgccgaccacgccgcccccgatctggcctaccggagctcaccggccacgccgccagattgatgaagagtgagctgataatggaatttttcttcgataaataggaaacttaagattaagatgctccggaatggaaatgaggtgcttcgacctctctttctacggttggtttctgacatcaatcttgatctatttcacaacaagtgaagtgggagattgacggttggtttacagactgcaatcagctcgggagaaaaagaaagaagtatctagctaaacttctatctgagcctttacgagcaggatccggagtgggttgcgttcattcagcaggagctgaatcacaacacccctctggagccatctgtcaatcaggcccctgctacttcggagccgtctgtcaatcaggcccttccttctgtcaaacaggcctttgtcttgctaaacacaaatccttcttttcttgtatagacgaaatacaaataagaactaagtagagtcccagagctttttctggtccatatgcagcctgaactgtgctgctctagctaattgcccaccccttccacgtgtgatttctatgttatgtatggccgtgcctaagggcatatcggttgaagtagattcttcttttctctcaaaaaaacccccctatccggacgccattgatataccaattccattgtataccatcaaaattgttagggactggcgccatttgttagacacggtaaaatgacaaatgctcccctagttaccataaaactaatgctacctatagctccatggcacaataaaaggtttcccttttgttttaattacacaaatgattgtgcaattgaaaaattcctcagtttcatgtgcacaatttaaaatccttccttgcatattggcatcgaggaaaaactcacttccatggtcatttatgggaagaaaaatagttacactcaatgctataaaattacatttgccgttgtcattgttgaatttagcatataatgatttaacttattccataaataaattatgacactgcatatgtaaactagcataatcgcataataagatctacacatgtaaactagacagtaaagcatgaacatatcaaatatgcgcaacatgtcgaacacgtaccgagggttttagaaaactggttgctcgtggtactgtgcattgacgatggcgtgcagcacgtgagcgaagaggaagacgagccgttgtggacgaacagggagcagtcgcataaagcgtttcccaaaaaccttattgccaccttctcccggtgtaagacgtcgaagacgaaggtttcggagacctgctcccccgatcaccggtgtatgccaacgagcgggatagagtaggactacgagcggtgggcatctgtgcaaggatcaccggtgtatgctgacgagcgggatagagttggactacgagcaacggatcaccggtgtatgccgacgagcgggatagagttggactacgagcgacgggcatctgtgcaagggtgaggaaccaatttcggggaccattcgacgtcgtcgtgcacacgcgccgccatgccatgccatgtgaggcgagcgagcgcgcgtgtattcccccctaatctctccacctcacatgtctcgagcggctatgagagtatcctcccttataaggaggtctccctctcatagaatacgcaaagtggtactaagctcttcatccatattatcccatgaggtgagcttttatgattttttaaagaattaattttcgaatgggctaaggcccatctattaatttcaacaatccctcaccaaatttcaaaatttcactgaaatttgcctttttttttcaatgtattgtttatataccagtggtttgatggagaacaattagggttgaacatctacctagaactcaaaactaaacttactcacaacttgaacaattaatggactacgctttgaattgcaagtcttgtacaagccagtttcactcagagtgttatctggtaatagaccgtcagtagactactcttcgggtgaaacatataagtcgtactccttgatctcttaataagcttcctagaagattcacccaaaatgaatctcttatatttatatcaactttttcctgggaaatctaaaatgaatcatgttttggttcgtctgctaggtggatccatgaggcatatatatatagcttcgattgtgaatatctatcatttgatggcccagctatatgccagcttaattggcaaacattttgtttctagctttacacatggactgcatgccaactatgcatgccaagtggctcagtcgtcgttgttcagtataattagtcaggattattcctttggtccatccatgcataatataaggtatttgttctatttaagctgtttgttctacgatgttaattgaatgaaaggatttaagattagtaaaattataatatgggtccttgatttttctgtactagatcttaggtatttgcatacatagataatgaaaacgagaatccttcgcctcaggcgaccggcggctccccccccccaaccgcgcacgtgaccccctgggccccaccatgtgtcctgccctcacctaccacgtgtctcaaaaaaatgtttcacctagtgtacttataatatttcactatgtatagatctaatgttgcagtgaattgaaacattcttttgtaacaaatcacccacatattttggaaaccctctattaaggaatttcgtttcattttttgtttcacaaaaaaaatgtttcacctagtgtactcataatgtttcactatgtatagatctaatgttacagtaaattgaaatattcttttgcaacaaatcacccacattttggaaaccccctattaagggaattcgttttattttttgttccaccaaaaatgtttcacctagtgtaattataatgtttcactatgtatggatcaaatgttacagtgaactgaagcattctttcgctatttgctgaaacattatttttatataaggtaaaacaacgcccgatttaaacgattgaaacattttcaatctacttggtgaaacaattctgatatacttggtggaacatcgtgcaacattttaaaaaaattcaataataagctaaaaaaatttcatcggaatatatccatgtgtgatcttgttttaaagatttaattgcaacgaatttaatggtgcaatcgaatcatgatttggataaataatttaaaagaaaaaatagtttaaagtggttttgcacgcatacatcatgctgacattagcgcctgattttccctctccccgtcgagcgtcccatcctgagttgtgtcctaattaaaactctctagttctttaaaatattatactctgcatgtgaatatatatggcaatatgttttgggtatattaatagagtttctgaacatttatttcaaacatactgctcaatttgtaccatacttagctatgggtccacaaaacccaacccaaggactactatacactcacccaacccaaggagcaagtagccgatcctcacaatttggagtctcggaacgaaacaaaaataaagacctttagttaaatgtatgagaattttttaaaatttacagcatatgaaatattaaacaatatagtttacaagaattagctagacttttatgtacaattagccacattatttatttttgaagtacttgttaacacccaacagacaccaagaacgaaaatagaaaaatatagccaaatttggaaatgtcacggtttccttcacggggccggtctaaccgccggcatagtgttggtcataccggcagcatatggtcggttagaccggctgagtccgactccgagttcaattttatcgggtcttaggtttccttacttggtaaggtattattcgagttctaattagtctatcccccgagtaagacatggagaggatcatgtagaaggcaagaccgatctctttataagggctatggccaattcaattcaaacctaccctatcgaatcattcttttacattacttactttcagtcatgtcttttactttatcctagtttcatctatttttctcgattttcatcataaatcgcctgccttcgctacgagagtacgataacctttgtaggtttgtctcgtaaaccttccgattcacccatgagatgggtgattaactccatattgacctaaatcaacctagagaccggtttacatctctaaatcggctccggtagcaggtttaatcttcaaaacccatcttgctttagagttttctatcaagatggttggcgactccattaatgcctcaaatatttagatgagtccgtgttgatcagaaaaagcacctgcagtactatcgtataattatttctagagtgaattgtacattggaccacctattttgacctaagttgcatatctttctgttcaagcaagtacacatacattatctttatctttgattaatctacaatatacatataaattatcattttcaatgaaattcgatgcatataggaaatacatgataaaaacagtatgataacatgacatcatacttcatccacacaccacactgcagattaatttactgaaaaaagtggataaacttttggataaaagtggcacgcttttcaaactgctaaacggtgcatttcgtgcgaaaactttctatatgaaagttgttctaaaatatcatattaatccatttttcaagtttgtaataattaaaactcaattaatcacacgttattacctccttattttgcgtgaaatatttaatctttatattcatctttatgttaaggagatttaaacaccacctaaatgtaccatggtccctctaattttaatgctctgaaaagtataactcaaatttgtgcattcctatgtgatatacattccctaggtccatactccatccacgccacactgctgtgtgtactgtccactgcctacctaccctgtaccagtacatggaccatagctaggacagtatcacagacggtacaactgttttttcatggtgtccgtatgcccttgtccgtttacatacatgcttgtattcatcagggagaaaaaaaagatagaaatacggctaaaagaattgaaacaagaaatccatagacgagaggaatttgaaagagagaatctctgccagggcccacacatggacaaccctccaaagcccctggtctgacatgtacaaatccctggacggccttggggggccacagagagagagagagagagagtgcatatgactgatctgttgagctggagttgcttccaactttgagaattgagattgaaccagtgtgtgtgagagagaggaagaactagtaagtacagattttaatgcggactcttgaaaatatactggctttaactttatctcactggtaaataaaaggatccacacactaacactaactatctataaggtggagttttcacacttggttaattatgtaaaaaaaagctaatattatgatagcaacaaccagtagtccaccaccgtaataataaaaatgctatccattaagcggagtcgtcctccttccctccccttctctcacacacgtggcacgtcatacgctccgtgcacgtgagtaactaccgtatccaatattatattcttaatcatctttctagtctatctctaattatataaacttgacctattaaaaagtacagatatattattagttttaaaatagcaccgtcactactaagaattcaccaataatttacggtttcatccaagagaatgatcctatttttataatgtactatttctagaatgaatagtcaattagatagttgacagtgtaatgtagcacactaggttataagtcatacggtttattagtgattaaaaatattataaaagtaaaacttttatatctatgttgttattgatttaaaaaccaatgctataaaataaatttacatgaaaaaaaacatgaaaatcaagttatagaatttatatttcggcagctgcttgtaagttgtagagcaaaaaaaaattccctcgtatgatttcaatcctttatattttcttcatttttcctttgctacaaagaagctataattaccattacaaggtactaagagcataatgagatagatatcttcagtgcatgtagggatgtaagtgggccgatccgcaaatctacgtatatagaggtcaaataaatgggtaatccacgggtttctgcgtcatggttcaactttaccgtacataaggatgcaagtgggtcgatctgtgaactcacttatagatcaaattattaaaagaacgcgaatattagagaatagcctaacatcaaataattagaaggggtgaggctttgaactcagatcggctagcccaccaccttatgaaactagccgaaagacccctagacgtttctcgtagatcaaattattagataaccagatgacaaatgacaaatccattagttaccccctacttttatctatatataagttcgcggatcgacctaactgcatccctaactgcgcgcatgcatatccctcgatctcagctcgatcgatcgatcaaactggctcttagacagcatccaatgtacgcgtagtttcgccgtaccgcaggtagataggtactgtagtaggtacgacgcgcggggctcgcgcgatcgaacaccacgtcgtcgccatcgatcgctgtccacccagctagctagctcagctcgaccgctgcccacggaggaagaatcgaacgcggccggggggcgccttggctggatcacgcgagaacaagagagcgagcgtcgtcgcagcacgtacgtcgcgtgtcgcgtccgcgtgcatgcaactgcgcgacgtacgtaccgcgggggccggggaaacgatggacggagttagttagttgaaattcccctgatggtcatcaatcacatcgatcgacatcgtccaggttgggatcatggcgttgcctgcgtatacgtacttgcctccccagaccacgcaattccttaactgcaaagtactgatcacaccctcctgctgccaacctgcatgccattgctagctagtagcagatgcaaggttggaattaattgaccttacacacgttagagcatctgcgagatggcctctcaaatgacccttgctaagccaaattttggtaattttagaaaattaaaaaattcgtactccaacaacctctctaattggattggatagctaaaccatccgactgcccaaatctctcacctcattggccaaacttgtctatccaaaatcacttacggatagtgagccccacgtactattccttctccccatatggccactccactccactccactcttaattctctctcgtgctgcagcgtctgctataccattaaaaatcgttggagtgaatgttaaatttggctcttgtaaattttttttgacaagctaataaccaaataaacattcgaagtagagccgataatagcaaactctgttggagatgctcctagcaaataatcattgtcaacccggctggtcgtcggtgaaatatttaaccgatccatctaacttggccagccggcagtccggcacatgcaagcattatgcatatacgtacgatatgtgtacgtggtgcttaagtgcttaactaattccagatagatcatcgatatatacatatattctgatgatgaagaagaagaaagaaactactttttgcccggccggcccctcctcgcaccctgattcaaacagtgtataccaattatattggcgcgcgtgatatcgagatcgatcgatatgatatacatgtagggctaagctagtactccctccgtttcatatcacaatattttctagcattgcccatattcatatagatgttaatatatttctagatttatatatatatatatatttggacaatgctagaaaatcttataatataaaacggatgaagtagcatatgcatatattccctccgtcgcaaaatataacaacttttagcttaaaatttgtcccaaaatataataacttcttcgcccacattttttttctcaaccaattacaagcctccaccattcaattttcccacctaccttcacttctactccaatcacaacactctcccatttaatcatacctactttcttaataaccgtgttcaactctaaaaatacttatattctagaatagagggagtatatgcggccccagataaatgggagatggatcgatcggtgttggtgtacatgcatgttactattgctagccactgtgtgtccggtctgcgtgatgcatggatggatgcaaagcgcagaagagaggcagagagagagagggggggtcatggatgcatggaaaatggatgggggatatatatgctatgccccatccccatcatgctgccctcccctgtgagacacagtgccctcttgtctccccgtgacacatatattcgtcgccgctaaagcatgaactgctgaagctaagctatagcccctcatgcatctgagcgaccttcaccaacctcatacccatccatccatgcattgtacgtaatgtccggccatggcgagagatcagtgtagtcagtcatgagtcagtcgtagctgatcactagctcgagtgagtcgcgtcttcgcacgccaagctgccaacccatgatgcacccctagctacaatcgccctggcccctgtccatgcatgcatgtactctcctatagtatattggaggtacatggaaactgctgttagatggacaaaattttagggcatttttgaataacatgagtggaaaaatgaggaatagaaaaaagaaacatatgattctgacaggaatgcaagtgtaaaacagatgattagaaaatacagggaaaacaaatgaatgaccgtttgatttgatagcaggaaaaacgtagaaatcagagatagactcaaaggaattttttaagaggttgaacctcttgctaactttcctccaaaatctctataggatttaggatttctcattcctactaattttaaaagataagatatgattcaatcctatcatcctatgtaaatccttcaaatttcctacacttttcctacaaattcaaaggggctgctaatagacatgcaaattaaggagatttaggttcaattaattgtttgttttctgccatccagcaaatattttatctctagagttgaataatatacaaatggttttggtcaactgtagcttaggggccgggggtgcaagcccacattgtcgcccgttgggatcgtcactctgcgccacgcctaaccgtacagaaaccttatagctaagataataatttctattctggataagataataatttctattctggatatagacctactctaaaattaagtgatttttaaattagcagttatgtttatgcatgtgtcacgctttgaggatggtctatgtcactaccgaattatagacctacctataattcggtagttcaatcatcaccgttggctcattatcactgtcaaatcgtgataagaactgtcagtgatactcaacataccagacaatatatatacctccaaatcctatatcatgtacagtaaaacaatttaatcgaattcacactaagtcattccaaaaaaaaaatacaaataagtgactatatattaaatttgttgctggaaggcatgctgactatatatagatcgcgattaaggaggagtatatggaagacgctgtagagagggaggagaagcaaggagagggttttgtgggggtatgggaattggcggcaaagatgtgtcaaagatagggatggcaaaggcgtggggcatgggcgggttggacaaggatgtccccgcccccgctccccgcgttctcccccccccctcccaactaccaaagaacatgtgaaaagtgtgggtttttccaaccggcactatgaaggcggcaccgatgagtgctccggcaccaatcccattttaaaaaccagcacctttgagaccactcgcgagccaaaaaaagctcgacatcgagctcatccaccccacatcatagaactccaaatcaatcacaatccccaatccccaatcaaccaacatcacagaacaagaaacactgaagaacatcacagaaatcattcactaatagggagggctccaccactgcctctcgtcccgccgccgggctgccaccacctccccacccgccgcctgccctccttccagatctgatggaggtagggcgccaccgcctctcgtcccgccgccgcgtcgcccctcccttccgctgccgcatgccgccgctaggccgcccctccacggccgccgctgggccgcccctccctagatttggcggagaggagggcgcggccgccaccgcagcctccgccggccacgggcaacgagagagagtcaagaggggagggtgctgccgccaggccgccagcgcctctcgtcccgccgccgcatcccccctcccttccactgccgcatgccgcctcccgccgatgacgccgctgggccacccctccccagatctggcggatgggatggcgggggctgccccgccgcctttgccggccgcgagcagtgagagagagtcgagagacgaggaagagagagacgcaagagatggaagtctgtggatgccttatctcgtcgactcattcggctcggctcaatcgccctataggtgccggtttttaatattaaaggttttgatttttttgaaaaaaaccgacacctataattgcttaaaggtgccggttttttgcgatttcaaccagcggaagtgtggaaaggcctatagatgccgattttagcacttccggcacctatagtgctgacacctatttgatgttttgtagtagtgcccggctccggccttagccccgtagagtcatccaaatggaaaacggggacccggcaggtgagcgaggcctcgcatcgggcggcaacatggagaacatggtgacatcattggatggcaacaagcacttgtttgcatggctggttgtcgacgaagggatggaggcacgcccggcaacccttccttggctgggaacgaagcaagtgacgggaaaaaggagaggacatgcggagacatccagcaaggggaacaagaagtcgatgacctggcatggagggatggaggccggaggagaggacagtagacgacgaggagggagagcgcttctcgctccaacggtgtgaccgcttctcactccaccgcttttggctcatgaatctgatgatgacttgcggcacatgtgttggggagaaatttcgggataggataaggggagagttccttcttaagcctgatgggccttattttcataacgggttatcactattgttgaatagtcccacattgcttgtggaagggcaaaggatctaagatataagtaggggagcccctcacctcataatctagctttttggggtgggaaaggccctttacgatcctataattggtatcagagcctggctagttcaacatttctggcccgagggacaaagtgtgtaaaggcctgatgaaccgtgggtgcctgcggggcccgtatacctgagggaccatggggaaatggtgaaggggcggtgaacggctaagggacaccaatgtgtgaagggggagattattgagtagtcccacattagttgaggaagggcaaaggacgtaaaatataagtgggggagcccctcacctgataggctagcttttggggtgggaaaggccctttatgatcctacaactatattttcactctataatgtaatcctaaggccccgcgggtggagatgtttccctgcccccggctccgcatgatgtcggggccctgcccccgtatcacctgcgagtagcatttcgcccccgtccctggccccgtaggggcgggtacccgcgccccccacccccaaacggggaaattgccacccctagtcaaagaggagagctaacgactattgacggtcataatagaccaatttcgactgtcaatacatccggaaataaaagagaattagcaatatttgtatgcatatttgtttaagaataatttatttccacttgtacttggcaacgtatttgtatataggcgatcttcatataaatggaggagaaacgatggaaaataatcgttcaaacaatcaaagctcgacgtgtggcagacttaatggatggatgggcccacaaacccattagaacacctgtaatttggcccaaccatcatgccactaagctaaggatccatcaagcgaagtccaggagaaaggatgtgccagcccaaggttcagccgaaaccgccaccagcgccgttcatcctggccttccacgtggacatcctaaattgcttcccaatgatgtttgcagggtgtttaggacattttcaactatcataaccatcattgagcctataaaaggatcactacatctccatttcaacacacaccaagaaggatcaatcaagaaactctctagttatttactttgttctaatgctagtggagtagaattagaatagttttcttagttcttcaagtcttctagagatttcaggtatcgctctactagctcctctctctctcttgtaagacttaattcaataatgaaatattcttctttatatagttttgttcctttacttcatttatataattattcgagtaccgactttagttcatacttgtctcgtaataattatgtagctagcttactagagatatgcaatggtattggtttggtaatcaattatttgattgttctatgtcatctgcagagatatagagtagtatgtagtaatgtaagcacaatgcttagattattagataccagtaaatggtgctatatgtacggatctatagaggtaggctgctgatggtgacatcttagtacatgtattcctccacgtgcgtatatagggctaagagattttcctagtgtgggtactcctccgtatctattaccaattggatggccatgacggataaggaactcggcaattaggcgtgatttctcgatattacaggagggcatagttaggggtattggctgcataattgtataatagaaagtgttaattaaaatgactatatactataagtacaggaattatgcttttctatttctttctccaattagcttagactattatttcagtgagagtattttggttaattctttttgtgtgtcaatcaacccttgtccttaaattgattaacccctgtattagattttgatcaacataagtgatataattgttattataatactctcttctcatatctttccttaggactaaataaaatacgatcccttggaaatacttccggatgaaatgctacagcagtatattcgagcgtttgcagattatgtctgtaactataaagaataataagtaatatttcgggcataattgtttggaattatatttctagtaattttttaagaaatattaagaacgacaaacaagaaactccttcacctgtgatttttgttgtgtgctgagctggagggaaatgatacttactaataagaaatcaacttattttaagatggaaggtgcatattaataccatgatcatatccacaaagaattgtgaactataatgaaaaaggaaggatctttcgatcttagcaattagattcacttgttaggtataggcctataatccaaaataaaaacagacaaacatgcccttagtatctcataatatctttgtgtttttttaaagaaagacacagacaagctggttttcttaaacaataagctgttgcttatgtgttctacccacgtgctcttaattatatggtgagcatggacactcttgattgtcttaggaggagtgttaaggctgtgtccgggaggtggaatttggaactccatctccccacactgaaaatgtggtggtttattaatgtataattaattaagtatcagctaaaaataacttaaaatagattaatataatttttgagacaaatttggtataaaactttttttaaaatgtaccgtttagtaatttgaaaagtgtgtacgtggaaaatgagaaagattagttgggaaatagaagaaaagaacttagagcaactccaacagtccccttatcccaatctccaagttaaattttagcaagtttgaagaaaaaaaaacactccaatagcttctctatttgactggccaagccatctagctggccaaaatggctccttggctggccaaacttggccagtttgcctgcctagccaaacttggttgctagctgtgggacccacgttgctccccacctcaatatctctttcccctctctttcaccgcacagatcgatcgtcgccgccatcatcgtcctacagcgccatcgtcatcctgcgatgtcgctggctcgcacctgcacagtcgtcgccgtctgatttcctccgtcgccgagggagctccgcgatgacgaggcaagagcgagggagggtgtgttggcgacggcgacgagggaggagcgatgatggggaagaagcggccggatccatcatcgctgtcgatggcctcctcctccggcaccactgtcgtcgtcgaggtcgccgtcaccatcccctctgcatccgtcgtcttgagggctccgctgtctcctaccccgccggattcggccggcggcgtgtaatcgccggggggtgggggtggggggcacgtgtggactccgctgcctcctcccctacgcggatggcggcgtggattcgccgggacgacgatgtgtggactctcgctgcctcctcccccgccggattcggccggcggcgtggattcgcgagggggggggacctctgccgtcgtctggccgccaacctccgcgcatccgccgtcggaccaccggccgctgaggttgccatcgccatctgccgcaccgtgctcgtcgagccattcaccgctgttgccatctagaaaaatggtgagaaaagagaaaggggaaaagtagggggtaggaatagcataggctgacatgtgggtcccatttgtcatagatttataatggagatggtagataaagagactgatggagcaagcaacgagtttaactagtcaaatcagatggagagttggctatatgggtatttggagagtgggatttggagaagctgttggagatgctcttagcctaattagcaatgctactaatgctatttaacactccctcccctctctatctccctctatcgctctctctcgtatggagtgttttggtgttgcatgctgtccctgctgtgcataggctttgttagctagcaaggcagctgcagttgtaggtggtgcagctcagctgggggctgggcatacagccccaaaacactgtccttggcccccctcctgcacagattcccccttctgccaaacccagcaaaaggttcccttgtctagctcctctcatcacacacactctctctccctctccaatgcacaagtaggagatgagtaccacatgcatcatgaccactttattcctcccttcccagagacacagatgagaacaacgctgtctcacctttcctgctctctcacctcctttaccacctccccctttgtctttttcttatcgaaaaagaaccggtactatatagggcgatatattagtataacaagaaaattataagattacaatcagtattagaaaaaacaatacagattaattaaattttaactattaaaaacttgaaaaacctagacttatctgatattttaaggtaacctttatatataaaaaagttttcatacgaaatatgttatttaacagtttaaaagaatactaatgaaaattaagataaaagaaaagaacggagtctaagcgtgagggtcggggggggggggggggggggacctccccttcgtcctttcttgagttgcttcctcccttgtcatggcagctcttgcaaggaggtgagcaagcaagcagccccctgttgtttgtgaattctggtcacaaatcttttagttgcatgtcttgcgcatcttctctcttgctgtagctagcttccaatgtgcgtgtgtgtgtggtacgaacgggtacgtcccctctctactctgggtgtttctcacatcgatgtgtcacttttgtaggatatgtgtgtgccactgtgtggttcccctcgacttttgtttcccttggcacaaagaaacaaatgggataaaattagcggacaagaggcattttgtaagcttgtatcaaaatcggaagatatatgtagcacacgagcttaattatactcctccatgccctattcacgagaaaaaatatctaataattttaacatacatctaaacaaaattagaggtttggccttacgtggtacagatatacaaccatcgaccgtatactcacgtgcgcatgtacttctactctggatcgatatcggtcctgaggaaaatgcgagcctaacaatatattagtttctaatatgctttcgcaacattcttcccattcaaaactatataaatatatatttatatctcattatgtgtttgtccaaaggtgaaaagagaatgacaggatgcaattaataacttggggatggggaagacacgggaccggctgagtatatatagaacgatggcggatggatctcctctctatctcctgcctacgagctgctttgtttgcttgcaggatttttagctgtactttgctaggggatgccacaggcttctaaaaagtatgcccattttgttcccatgcgtttgttgcattccttggctgcattttttttttgtatggtttcaggcttgtccgcgagtgatttcagctactatgctgagtttgctgccttgctatacgtgggctttgtccgtttgctccaggtcttaaaaacagtgaaaaatccacggctctgttggttattacctctgcttctgtggcgtattaatcctctagctagctacctcaagctttgaccattcttaccctcgagtgtgcatggcctggcctggctggcaggccagtcatccttgaaagttgaaagttcttctcttttttttttcagaaacttaatttgaaagttgaaagttgaaacttgcccctctgatcacaatacaaaccttcgttttaacggtattcatgcactgatgcgatttctatgtttcaatgcatgtaaatttaatcagatgcttggaaagaaaatctaattaattcaaaattaaaaaattgacaattaaagtaagaattttttgacctaatattattgtttgctaaataacccaaaaatccttatatttcagaacgaagtgggtatattttaggacttttgatgtagtcttcgatattgtaggagtgatgttaagaatttatttttaaatacaaatctacgatacattctttcacagcgtgcttttataaagacttcctcgatcagaccttaacctctacgattttaacaaatccaatactagaactagcattaatgaagatatttatatttaaaatcaggccttaacctctgcgattttaataaatctattactagctagcattaaaaaatatttgtatttgaagtttttcgaattttacatgaaccatacatgttcaaaatggcatgtttttgttactgaaggagtatgtttttagccaatgtcctatgtgaaaagaatttggctatattggtttttgaattggctttccccttcagaaaacttccgaggaagcaaactaattaaacatcttctgaaaattgcgaaatgatgtccaatcgactgtttttaagaaatcatggtataattctggcctataacaccaactatgatgtacaattacatcggcatttgctaaatgtaaattaagacaaggagcaaaagaccaaagtaacaatttggagcaacattgtttggactcgatgatgatgataaaagttgtttatacttctttcgttaacgagggcacggctaagatatttcaccatcgcagatcaaaagtttctccaaagcaaattcttcaaacagaaaaaggccgcttaatacggtgcggtggaggcctcgtgctgccagtgtggtggtttttgagtggatgggcgacgaacttcaagaaaggttgcaggggttccaggcgaaagccatgtctagtagttcaccgggccggcaatggctacgccttcgggtgttgtaaccccctctagggcactgtcgaggattcatctcttccttggcgagtttctcgaggtgatggcggcgtctttgatgtcgtgatctctgtgggggcatcgttttagagtctcgtctttgttgttttgtcgtaggcctagtggcgatcggccacgtatagcggaggtcttttggtgctaggttcctctctcggtgggttgtgtttgtgtggttagcacgtggttcttagtcatgcactttggtgcacttctgacttcgatagtgtctgtcgattgttgtaatttttttcctttttaatatattcggatggtctccttcggtctttcccggtgaaaaaaagccgcttaagtcgatgccgtcgatggatctaattaactggtgtaggtcattgagagttttcacctaagttgcttgttctccaaaatgaccaaaaccatgccacaaattctgttggattgaactagaaaaggctagattttctaaagtctatagctcagtacacatattcgactattaaaattaagattattgtaggttataccgatcaaacagagacgtcagttgcggagacagggacggctagtagcatggcctcctcgaacaatacttctatatctatatttatattacctaattaaaaaatacgtaaggtttcgtaaaaaaaattccgtccgtcttttttttctttttcgtccttttttgcaaatttttttcgtccgttttcctttatccggcggaaaaaaaaagcgtgcaaaataaccacatgcaaaaaaaaactggggaagaaaaccgcgtgcgaataaaccaatcggataaaaaaaccgatcggacggaaaaaaaccagcaagaaaacagcctattggacttttttttctcagtcctttttcaccctttttcttttttcttttttctgttttttagtcttttttttgtccgtctttttttctgctctttttccatgtgctttttaattttttttctgggccttttttccggttattttcatatgtttttcttcgttgctgttttttagttgtatttttccgcacgcggtaaggatttgtgccatgtttttttcatcacggggcgaacactaacgtcgccgccatgttgatctatcttcccatgcgttccctcctccaattgattgccaaacatcaatcccccctactccctcaccattttcctcatgattttcccttttaactccgctgtaattcactgaatttaatctctatttaaaaatcaccggcttttttttctttccgtcctttttcaccctttttcttttttctttttttttctgtttttttcgtctttttttgtccgtcttttttctgctctttttccatcggctttttactttttttctaggccttttttccgggttttttcatatgtttttcttcattgctgtttttttagttgtatttttccacacgcgataaggatttgtgccatgtttttttcgtcgcggggccgaacactaacgtcgccgccatgtcaatctacctccccatgcgttctctcctccaattgattgccaaacatcaatccccctactccttcaccattttcctcatgatttttccttttaactccgctttaatttactgaatttaatctctatttaaaaatcacctttttatctcgagttttgtcgcttcgatttcaataaaaatggaaagaggagaactagtgtatcaaaaactctctaccaatttggaagatcgagaaagattcgactggatttgatgtgggggatttgaccagatttgatggggagaatcggggacctacagctccacttgacaaggaaggaaagaaatgagtttttgtccaaaaccaaataggaaaatatatagcaatctaaaaatgtttttacccgttgcaacgcacgggcattttttctagtatattgttaaaatacgtaaggtttctgtttttttgtccgtcactttttttttattttcatcttttttttcctttttaccgttcctccattttttttcttcgcttcttttttccttttttttcacccgttgtttttttctcttttaacgttctgtttttttttctttttcgccgtttgttctcgtcatctccaccgccatgtcgatcggtctccgcattctctccttcaattgatagtaaaaatcgattcctcactactctcttattattttctccataatttttcctttcaatgccgctttaatttaccggactccctcattatttttcccataatttttcctttcaattccgctttaatttaccagatctaatctctatttaagagttttatggattcgctcagattttgataaaaacagaagagtagaataagtgcatcacaaacccttaaccaattttagaagatcaataaagattcgatgcgatttgataggagatcagttctagcatcacactcttccgggctttgatggggaggatcagttctagcatcacactctttcgagctttgacgacagcagtcggctatatgagttgctataatgtatagtgatcgaaaatgtttttatctattgttaaagacgacagtcggctatgcgagccgggcctacagctttactcgtgggctaggtcaaagagacgcacgccaagctgagagaggtagcgggctaggctgggataaaaatagaacgaagaaataatcttttggcccaaaaagagtataatgtatacgattcaaaaatgtttttatccgttgcaacacacagatattttttctagtttacatatatataatcatgtaactaattaggtaattaaccaaagtaatagcgtattaggttatctccaagactcttgggtggtctctcttatgttagaaaaccttactcggcagcagagaaacatgcttaattaaatgatcaacttttaaggtatagccaacttgaaaatacatgaagcggccgacacgtacggatctaaggacgagacttcatcagaccatgaccaccatacgcagaacccctatcgcacttgccaaaccgtcgcgatctccacaaatcgagccaaaaacattctgcactgtacacgaccaatttgtatctgcctagctagccaccctggcacgctgcagatacaactagcttttgctcgctcacttagtttcaactagagcttttgctcgctcgctcactactatcttcaatttatttatagctaaactaatagccaattcatacaatagttgcttactatactattaatatatagtcccacctgtcatatacacattgcgtcttggagtccgtgttgcagctggctacgaatctgtagcccgctgctcttctctctcatcgtttatctcattaaaatatgtttatagctggttaatagcttgctattgtatctgctctaagtccattgtaatctatcttccactgccattgacaacaagggatcctaggtaaacgaagattcctagtttgtaaacttaaaaagaagaatggacaactacatagcatcctggtctaattagaatttagcatgtgtgacttatgataactatgtgcgtatgtttactatcaccttgctagtttagtaagagtggaaccgacatattagaattcatcccttcaaccatatgactcccgggttgatccttttatacgaagcgatgatggaagtataagtgaggtggtatgtgtaagtgggtccacctgtcaaatagactggttacgcagttctgaagggaaggctattacaatctattcagcataattgtactaatataggccaaagagaaaaatggtcatagacctaaaggacccagagcaggggaaagggaatttaaaccagtgtggtagcttcttctagaatcggctgtctcattaaaatgcaatgtccaatttgcagtatccaatttgcaagtggtccttgttgttttagcaactaaactgaagcacatgctgcctccaaccccagagcaatgcatggggtggcaactggcaactatctctaccaagagacaaaaaagaagtatgattaagtgtgggtaactagagacataaaccacaggaataggataaacaacaccaagacaaacattccagtcccagtagtgcttatagctaggctagaatggtgctaagcacaaactgcatcacgtgaacctaactaggaaaatactatatgctcatactatcatagtagtaagaaagcaagaggaatttaattctctcttggaagaacaagaatccaactaccaaatctctctctcccttatcccctttaacctcttcacaaggatttcttctttctttcttttctttttctcttttgttcttgtgggaacatgcatgacaggtgcaggcgtcagaatacggatgggcacaatggggaaggaggatgctaaacaacaaaaccagcgtcaggccagccagcatagaccacggtttgtgtacacacacacacacacacacacacacacacacacacacacacatatatatatatatatatatatatatatatatatatatatatatatatatatatatatatatatatatatatatatatatataattcatatatacacacacacatgcacttgcttccaaggcacacaccagaagaatatcacacaagcagaagcaaacagggcagcagcacatcacatagaagtagtagtagatcacacaccatgatgcatcatcaatatatgctctctaccaaaatcaaagccacgagccacagctccagccagccagcagtatgcagttggcactttacttggcacccacatcacaccctgccaacttccaaagcaagctctatactcaacagctgctaatccagacaagaacctgcagatggttttaatgcactaattagtaactagttgttgcatgaccccagctccagctagctcaagaatggaaatcagggttacaaatgttcatccttgaaaaggtaaagggaaatgtgaagggggaaaaagggggttagtctcacaaactggaacagaaaaagaaaaaagaaaaagaaaaaaaaaagagaggagacaaccaagaaacaatggaaggaaaacaagaattctagagatgggtctcctcccatacattggagtgcaatgtaggtaataatggcgaaacttggggaccttctcgccaaaaactcttctctctctctctctcaatattttttttccctttggaagttctctctaacagagcatgcacaattgcgagaaggcccccctacaattagtgaattgcggaactcggcggcggcgagcggcggcgcggggacggcggcggcggcggaggctcagacgtagccgttgcggctgaggtggaggaggccggagctgccgcacttggggcacacgtcggcggtcttcggcaccatgaagtacatgaagcaagcccggcagccggcggcgacgaggacgtgggcgccgttgtcgccgacggcgtagccgctgccggcgccggaggccgactcgtcggtgggggagaacgacgagagcgtggacgacacggcggagccccggctgctgctggcgctgctgctgctgctgctgctgctgctactgctgctgctgctctcctcgtcgtcgccgtcgcggccgtcgtagccgtagccgtagccatagctgccgtagccgtagccgtagccgtagccgtgcccgctgctgtcgtgcgagcgccacgccgccgccgccgcggtgaccgcgcccacggacgacacggaggtgtaccccgacgacgtggtggtcgacgccgcggcggcggcgccgcctccgccgccgcggccccgcgcgcgcgagcagcggcgggaggaggacgacgcggaccgcgacgccggcgacggcgagtacgccgacgacgagcgcggatcgatggtcgtccgggtgccgtcctcccagttgatgtagtaaacttgccccgtctgcatcagcaaagccaatcacaaagcacatttcacacaaattcacatgaagtcatgaactacacatcaaaattcatctaaaaataataacaataaaggaaatgcgcttgaactagacagctagtggtacagattaagttaatcttgcaaatggcgaaatgctgtttcaagaatgtggtgagtaaatgtgcatgatgcatggagaagtttgggtggggaaaatctacaagtacattttggtgacagtctgcaagaacaattaatgcggtggcattcagttgcttccgtgaaacaaggttgagaacctattaataactgatgcccataacaaagtacagcagaacaggggaaagaaaaaaaatctggatcaaatggtgtaatgaatgctgctctctttgtcctcttgtttgtttgcaaatcacagggcaaggttggcaatgaagaacaccaccaccaaattctcatttcatcctttgtaaaaaaaaaaaaactctaatctgcaggaaagctgttctacttaaaaagcacataaatgtattgcagtagtatcttcagaaaaggctactgaaataaccataagaagagcatttttgtctactctgttgctggagacaaggtggagatgaacactccattttggtgattaatacgcatgaatcttcattggggtaggcattcattcgtctgttcaaagtactagcagggatgaaaaagaaagggagacactttgtcacaatggaactgaagatttcccagaggtgagaatcatctggtgtttaacaaagctctgcgattagattagaacccaggaccaaaaaaacagagcattgtggtccagaagaaatctatagcgaaatctagagtttcagatagagacagagcaaaaaggaatggatctacagggatgtgtcagaaatttagaatgcaacacagatctgaatgcgcgcttagatcagagaccagagaaggtgtggagatttgaagagccttgatatcatcaacaaaaaaaaagaaaaaaatagtaccatcttttccgaggtttcttttctgaacttttgtcatccctgtgttaaaaagaacggcctgaatctctctgaagatgatcgaatccccaaccaaacgaagataagaaccgaagaaaaaaaacagagataaataaaaaaaatatttgcatagacgaagagaggaatcgcagatgaagcaaggatccaagaacaagaacaagaagagagaagggagacgaggagcagaaagagaagaggaggaagaagaaaaaaaaaatcagcgcggacgggtcgtctcgtctcgtctctctctccagttcgagcgcccgctttcgccattaatgatcaaatgattgatcccaatcgagcccaaaccaaaccacacccacctacctcggaaactgctatccatttatgtctccaaatgattggacaaagggcggcgcgccgccgcccaccgccgccgccgccgcaagaatcgatcggggaagaaaaggaaacgcggcgtatgcatgtatggatgcatgtgtggaagaagagatgggcgagtagtagtagacgtacccggatgtcgaggcactgctcccagtggtagggcagggcgacctcggagttgagctcgacggtgaccccctcgctgtcgtcgctcccctccgccgccgccgcgcgcctccccctgcgccgccctcctcctcctcctcccccgccgttgagggagcagttgcgcagcgacgaggcgatcatctcgatgttcggggcagtcatcaagtccaccaccaccaccaccaccccacccccccacccctccccctctccaacaagaaccaaacggacggcgaggaagaagaagaagaagaagaagaaggaggaggaggaggaggaggaggagaaggaggaggagaaaggaatttgcttttgctgttgctgccgcagcggctgccgatgccgcggtggtggtggtggtgcgcgtggccccccgggggtagcgtaggcagcgtatgacgcgtgaggctacagtggtggaggtggaggtggtggtggtgcctggttggagccactgttatatatactgccattgttgctcctgctgctgccaatcttgggtgtttttggggtggttttttggttttggttttggtttatagggttctttggtttggtttaggagggggtggagggaattggaggaacagtctgtctggacgagtgccaactgtgtgccaacatagtatgcgctgggattaacggacggacgccgatgcctgcccagggtatcgggcggtttctggttcacttcctacgtcttgtatgcttgcccaaggtatcgggtggtttctggtgcacttcctacggctgatatggtgctggcgggtgggggtgggagcgtcgtgatatgcgccgatggtttttccggcgcctatgtaaatctgggggccgtgagagaggttttgttttcgtgcgctggattcactggcgtgtaagtatgcgtattaggctatgagtaattgacggcttgtccgcttcctttttagtgaagtaatgatactgtaataatgagatatgcttccaaaacaacgagaggtcgagagcgatcaaggtgaaagttttaattaaccatgcctagcttcctggtattcatgaatggtattctatgctacgatagtccgaaggcctatggaacctgtttcacatgtgtataccgagtctatataagtaattgtgtgttccttatcaatgttgcattgaggatgctatagaagacaataatatttttttaatgaatgaaccagccttgatcttctttttgtttaagataaaagaagaaggaaaactgtgataatgtggtgtacgaccaaaggaagaaaagtataagcatgaaggggttgaaaggtgcaaatgatgaaagctttctgctgcagccaagggggagagagagggggggatcgatgaatgatgctagggggaaaggtaacatcaacctactaccatggccactctctctctctctctctctacatatcgctctctctcgtatggtgtgttttggtgttgcatgttgtccctgctggctgatgcagctagcggagctcaaaccaaaccactggcccggcccggctcttgggccaccatctcctgcgcagattcctcttctgccaaaccgaggaaaggttccccccttgtccctccctcctcctctctctttctctctctccttccttgaatcaacctgaccatttcaaaaactccatcacaactagctgaatttgtctcttggaaaatggcattagcttagcagcaaaatgtggcaataaaattatagaaaacatgcagtgttatgtacagtgtaactgtgtagagagagagagagagagtgtgtgtgtgtgtgtgtgtggaggaagaagaagctgagagcctgagagcaagcacggtcagtggcctctgatgtctttgacctactagcatgcatgcatgtacaccactgttgcaacatcagacgagatggatggatcgagctgggacgcatgcgagttaatacttttttttattctatattgatcatcatatatataagttttttcatgaaaaccaatgtgagttgagaacatttgaaacgttgtagagagttttagcaaaatttgttaagtcttctgaatgtgtaacacatctggtcgtcgccttcatataatttgacaggcacatatcaggctgaagttgactagatatgtgagattgtctcacatgttcactactcgatatcacatattttatttaatgtaattaagttgtgatggaaaaaatgaaagcttaacaacctctaaatgcgtgcatgcatacatgcatgcttaatttgcatgcatgcataaatcgcatcacttaacattgggtgagtatgaattatcccaagatctgaaatcagacatctttcatgctcaattattaatatcggatgaagaacctctaacttaatccggagtggttatgatcttagttggtagtcaagtcagcattttatttaaaaacaatatgcggaatccacctatcagattctctccgtttcacccctctctaacagatggatcccaccgatttcttaaaaaatgctacctagactgtcatgtaggaccaaaaccactctagattaagttaggagagttcttcacttgatattaatagttgagggtaaaaaatgtctggttttcggatctaggtgtaattcgtactcacctaatagtttagaggtgtaatttagactttctcctaaatacaatactgttgcacgtcaaaccaaagggcactggttatataatgatcaatttaaattttttagtattatatgatgatcaatatgtgaagggatcgatgatgtcacactacgtattatgttcgtttattttagaaagaaaggagcatggagaatctcttattaccatgtagcttgtctctgtcctctcctctccggcatgcatgcacgcgcttgcgttgcttcgtttcgcttggttgcttgcacgcttgtccatgcatgcacgcacgcgtggtgtaccgcgaaaatcttttggatggctgcgcctagctcgtgttcgtgcatctatctatctatctatctatctgtctatcttgcatcatcatcacgtactggatcgatgtatgtatctctttcctcctcctcctttttttgatctagcatatagcttaatttgttctcgttctcgttgttgcggtgtacgctctgctagattccaatgcagatgcgtggtagtactcctacgtgggtaacatgggacatggccgttgttgcttgctcgctttgctgatctctggtggtttctctcacgcccaatgacgacgacgaccatgatgatgattgatggaactccggaaagggggagattgttttgtagggccgtagctgtctctggaacagatatgctgcatcgatctcggaccaaccctgctactagtagtggtagtggtggtagcggagatcggtcgatttttttgggccctgttgattcaagtggacgggcaaatgcgaccctccccacacggttgtgcatgggatcgacgttttcctcctcccacgtactacctccttccctaaatgtttgacgtcattgatttttttaaatatgtttgaccattcgtcttattcaaaaacttttgtgaaatatgtaaaactatatgtatacataaaagtatatttaacaataaatcaaatgataggaaaagaattaataattacttgatttttttaaataaaataaacggtcaaacatatttaaaaaagtcaacggtgtcaaatattttgggatggagggagtacgtacgtactacctccgtatatttcgatagaatcgactaaggcagtgtttgtttctatggaaggaagataaagttagtgcacagaaaacacgaaaaggaccccgtaaaaaaacacgaaaagtcattattaactcataatttattaataagttttcattattacaaaaaaattgtgcaacaactttcatttatcaccgctacataacaggtttttccatacggtccaatcccaattttcacggatggcagggcgatccacatgcaccaaatggtctgtgaaaatcgttcacgcgaaaatccgactttttacgtgcgggtgcttatgtcgcccgctcgcaaaaataaaaatccaaaaaaattaaaacccaaaaatggcgaaacctaacctgccctcctcgtcgtcgttgtgggggcataggggcctagcggcggctgggtccgcccgctcccgtcgccggagccagagccagatccaccgccactgtgcctccccactgccgccgcgcggggtagggcagccgctgcccctccccaccgttgtatccgccgccgccgcgcctcactgttggtatttattatgaccacggaataatctataagcgcacaaataccgttgtagccttcacccaagagtatttcagtgtatcatatccacagtaaacgtgtgtgtataatctaagaacgaaattcttcgaaggacaacaactaaatggtaggcttgggatagagtggactcctgtgggttagttatcttaattaagttaacgtaaaactctatcacatgggcaagataacttgtcaaaaaaccaaatcagtgccaggtccattggtgaaagactatcttagcacaattttccatttgaaaaaataatagtaaaaggacctcgacaatcctttgctagccaataattcacatacctattcatgtaaacaaatcacaactacgaaaaggattttttcgtgcggtggaaaagggttttcacgtgcgagtgggcgaaccgcacgcacccagttgtctgcgaaaatcgctattttttgcgtgcgggtggcgcaccctcatgcgaaaatctgattttcgcgtgcgggtgcttatatcgcccgcacgcaaaaataaaaaaccaaaaaaaaataaaaaaaaaccgaaccctaaccttgtcgccatcaccatcgtcctcgtcagatccgccatcgccacgcctcctccctaacctcaaagccgccgcagccgtcgtcctcgtcgtcgccgttgtcctcgtcagatcagccaccgtcacgcctcctccccaccgcccgccggccgccgccaccaccaaataagtggcttccaggcaagcatgctctgctgttcctcagaagtctcaaccaccgtattaatcagaagagtgcccaaaataccacgaacttccaagcgaactctatatggcaactctccattgaggggctcaataactgtgtactatggagcttcaatgtaaccggcaacaaatgtcatatttgcaagctccgcaacaaatccttccatgccttcaccatggtgagtacagggagaatcggccatctaaagaaaagatagaaggaacaaaactgactccgatcagaaacgagatgctggcattaaaactggaaacaaaaagaaagaaaaggcactaaactgaaatcaaaaatactgaagcaatataaatatttttttaaaaaatactatttttggcccaattttttttttaaaaacgaaactctccctttctttttaaaccgaaacccttccctttttttctgccaaaaccttttccttttttttgccaagaatttttttccgaaaatattatttttctttttgaaatgccgaaaacattttttttaaaaaaaatcaaaaggcacaaagaaaaatatttttttgatgaaattcagaaacttgaaaacaaactcatttatttggactcactggaccacttgaaaaggagggaagaagagatttccaggggaataagagaatttcatagggctctatgggctttccgtttggtttgtcctacggtcaagatcggctctgataccaacttgtcacgcccagagattcgacaacccgaatcccggctatctgtgcatagtccaggcatcaactagagtacacgaatctgaagaagttaaaaaagactcacactattgtatttttcaagttaaaagaagacattagatggagcggctgccactagttgtgtagtcacgtcctatgaaaaaaaaagcatatattaaagttactttctttttattataagttacttctataatatatataaattacttttaggctttattaaatttacttttatatgtctatgtaataattggctgtagctcttttgagtaaaggccgggatatttattccattatctaaaaaaatatatctaagaagtgatttagtgaaatctaaaagtaattttgatatattataaatgtaatttacaatttttcatcagaatataatcatgtgagatctttctacaaagatttaattacgaacacgacggtgtaatcggatcgtagatcggatgagtagtttaagagaaatttttatttgaagtataggtggataggatttctcatagatgaagtagtagcgctgtgtagtcatgtccaatattggatgctgcctttcaaaaaataaaagagcaattacaaatttacaaccattttaatttgttattacagaaaaaaagagaaaacgatacttctaaaaacaagcatatccatatcagatatcgtatcaaacacaaatgcgtatcgggatactctcgaatgcatatcgaacatggaaaagctaatgggcgattgatcgctaagggcgatcagggcgacaccccctcctcctcaacgtggttttcttttttggtaccgtattactttgctatttttagtaaatttatacatctaaaatttatacacctcaagtttacacatctaaagtttatacacctaaagtttagagacccaaagtttataagtcaaaagtttatttatccgattcaaatttgaatttcaattcaaattttttttatatatagtattttctatatatctaaagtttataagtcaaaaatttatatacccgattcaaatttgaatttgaattcaaattttttatatatatagtatttctatacacctaaagtttagagacccaaagtttataagtcaaaagtttatacatccgattcaaatttgatttgaattcaaatattttttatatatagtattttctatacatctaaagtttagagagccaaagtttataagtcaaaagtttatatatcctattcaaatttgaatttgaattcaaataatttttatatatattattttctatacatctaaagtttattaacccaaagtttataagtcaaaatacccgattcaaatttaaatttgaattcaaatattttttatatatatagtatttctatacataaatttttctaactgtttttttatttttaaaaagatttatggtgtagtacgaagagaagaaggggagaggagccatataggggggatggggtcgatcacctggagcgatcgatcgcccattagctttaccctatcgaacacatatttccgttgctttttaaacaaagaaattaatttctgctactttttcaatatttagtccatacattgccaatactcctagtataaatatcatcataagttacttaaagtttgacattccatcccatttgaaacttattgcattaaaccatgcatttctgcttttccttccttctatattgtgtattttataatttatatatatgccccgtaaccgtgattttgaaaatatgactcagagcatctcacgatttaaacagcaggctgtatcagcctatgacggatcaactcgtcgacgtacattgagcaaagtattgcgcatgatccttagcatcattatttatcaaattttacatagctcttctcattttgcgacagggcagtcacccttactcccttagcatgggtcaggatgtagatacacagtaaaaaccttctaaaacagtcaggcgatttagatcaaaccacatgggagaaaaagctgctacttgggacttgggagtgttacagatgtgaagtccaggttatgcactatacacactgcttataggaaacagccaactggcaactgcttccattccagtgtcactcttccttcagtatcggcggccaccgccagtggacaagagcactttggtgggtttcttgcctttcttcccgactacatttggtttgtgcgtgtccaggctattgtctgacgctctagtggaggaaatgatgctggcaaaggataatgcgggtgttgcggctggccctgcatagaaaacagtttagttatgccaggatttcactagaagaaaaatgggcactgccgcacactggtaagtgccagcgtccaaaggtgcatcgtgtgtcaccataccttgttcccccgtgctttcacttttgccagtcaaatccccagattcaactcttagaggaggcgagtcttgggcagacgcaaagccaagccgtgcaacatcggagaaaagctttctttcgctggctggtggactcgtggagggtccagcattgtttccaagagcttaaatggaaaatatatacacacatatgaagtgaggcagggcaaccaaccatacaggatgaaacatgcagagaactaaaagcacaattgcaaacatgtgaatgcttcagaatgtggattaggagcactaacaagtatgtgttttgccccaatagaaagtctgaatatgcaaaatcaggtctgttcataaatgagtttatttaccttcaaagtcatccagagagaacataaaatcgccatgtggcccactactgggagagaagcttgtatgttcaaacagcattgcagatgcctgtgcagcagcagcaacttcggctttcactctatcgctttcttcctaaaggaaagcaccaaggagaaaaagtaaatgaccaaaataaaccttacaactataagagtcagtttgaactggtatgcaaacagagctgaacacaaaaaacatctcactcaggtatattcttgaatatattttggcagccaaaacacccaattttaaagaaattgaccagcaactcaaaatattcagttttttttccaaaaggcaaagtctgctcttagcaacctagttataagttatgtctgcttgagaaaatccattctatgtatctgacctcctgtcacagtttaatttccatcctaattcatactccctccgtcccaaaatataacaacttttagccctcaacatttgtcccaaaatataacaacttcttcaccaacattctttttccaaccaatcacaaccctccaccattcacttttcccacctacctccactactcaaccaatcacagccctccatcattcacttttacctacttccttaataaccgtgtccaactctaaaaatgcttatattctgggatggaggtagtactttttaaaacataccccttaacttgcaaaaccattcaaaggaatctctcaggccaaaacaacagagttttcaattgcaaacagtggtttcaataaaatttactttcatggaatttggctcaactccatatactgttaagccacccatcactctccatcccacagtcagtgtccacattgaccaactttaataataattagaaaaacagtctgctcatgaaaaatcgggttgtttcggccagggatgtcttttgaacagtaatgaaactttgtggacatcttttaaatggtacaagagtccaaaatgaaaattgaaccaaggtatcagatatgttatagtacaatgtcctattttctccatgtttccatattgtgtggtacactggtagacatatacatgtataatatgtcttgaaagaaatgcttttaaaccatgtgagatagacaatgattactgtaactggcaagattgcacttcccagttctatcaaagttaataatatgtttcatagcatctccagtcatgtacttggtgtgtcatttctggtaaacaaacacaccctgttctacataacccaagagtaactacacgtctacaccacacttgaaggcactgcgtatatcataagaaacgatggacccatacaacaaattaagaacatctaatgttactaggtgactccttgaaaagcgcctctataaaaaactatttgacagcattattaaatccacagggattaactgctggcaaatctgagaatagtgtccacttgcaaaatacaaactaaagaaattttgaacaaacaacacacaacagttctgactaacaaattttcaaaagtcgactagtcatgatatgactactgatggcgaaatgctgaataaacaatacaaagcagttctaaccttcttggcagttcgtttcctctgtttctctcgcttcttgatttcatccatgaatggagctaatgagctaggaggcagcatatcacccaggtcaatttcacagaactgcgtagttcatagatgacagagcgtaagaacaagcttgtaagtaaaagttagttatccacaactggtttacctggaacgttgttgtcaatgagaagtgacttagataacgatagcgctttcttgtagcttcggattgtgttacagtttctagctccaagatttttccatgtattctgcgtgcaagtaagctggataagtatcaagcaaacaccacgagcaacaaccagatacaaaaaaaaaggagaagagataagcactccaaccagaatgtagtatctcatgcacacaagaaatacattgctcgagcaaattgagtaaaattggttatcagatcaaactaaacaaattatctctgcttacatagtgaaaaatccaattttccataatcataatcaggatgcaatctacccaatactaatacaatacacaaaataatgtgtcaatatgagagcgatgacttttaaggtgtaaacaaacactataccttggtgggagcatatcagaacttccataatggtttataaggcatttcatgtttagcggatgaagaattaggtgttggccatcagatacctgcaacaagatttgacatatcaaaactctgagaatgaaaaaccatgtgcacaaggtaaacaatcacagccagacatacttcagacctggtaaaaattataagtatcattctcatttgaatctatgggagccatacatctctcttctgttttcgatggcattcctttattaaagattttatttgattcaggtgaaatacagagctccgaaacaccagcaatcatatcttcatctgatagaggagatagcttgtgttcactgttctggcgtgaagattgtgcattattagggttccttgatttggaactagttacaggtgagaagctgtcttttaggggagggctgacactaaaatttctgtactcactccaatatttcatccgttcttctagctgctccaaagcggtagaaacgtatggaagtttctccaagtcatccacaaggcctaaatctgccatatgcaaccaattaacaagatctgtttttgcctctctaacagaaagttccacatcagacgtcaaaatgaacttggagaatgcactgcaaggatcttcgtctatagtagattcatcagtgaggttcttaatagaaggagtgagtgaattttttgagcggctcaaaagtgtaaatgtcacattgtcaccaacatgaaaatgctggacttgagtaatatagattgtatacaactcctttgttgagatcatcatgaaacacagtgggcacttcttccagctttcacctttgtaatcttcttttcccataagtaaataacgtaaaatgcatggaaagcaatatatatgaccacatgatgtaatctgtgggcacaatgggctctccaagcaaatagggcattgcacctcacaagggctataatatcttacacatacaatatcttcccactggagcatcttatctggatccattaattctatttcatagcttccagtatccaacacaacaaacttaaaatttgcttgtaggaacaaatctttgttgtatggtctgatcttcctctgtcttcttgtaggatatgttctggggcctctaggctgtggccgagaaattggatcatagtggaaattcagcagataattggcatttacagactgattctttctagcagtcacctgagtaccattcccactagaatttgtagtggatagatcaatcttcagggattccatcaattcaggtctctgaggagttgcctggcctgaggtgccattattggctgaaaaacctgaattcccatgttcagaagagtggcattcagaaaaattgccaacttcttgggtatatgaatcatcattctcttctctagagattctgaatccaactacctggacatattccagattcataagaaaattgaatgtaagtttcataaaaaatcaagagcaacatacacaaatgtttatcgaaaaactgaaatctgatttgaattacgttatgtaaacattttaccttttgggaagtatcaacatattctctgatagctggaaccaccgagactgcaaagtatgagttgcgttgtaaaaattactttccaaatgggtatattggaaactagtaaggcaacacttcaataatatttatgaaaaaaaaataccaatcaatggatatttttattagcaaaatgatgtaatcaatgagcatgctcatagcagacattgtcaacactcaacagtgaatttgagaatcaattgaactaatgaagaacacaaaatggcttctaagggaacagaacttggttgagactgcaacatgctatgtcaaatggggtcactatcttcatgaccccattgttatttccactatttatactagatagcataacgttcatatggaatcactaactcctgaaaaaacataatcccccgctcgctttaattgagccttccccacttttgaaggatagctaagtaagttgtaaggcatcaattgtccaatatggtagtgcctacctgagaccaaaatgtctttacaaagaaatgcatgctctacagcaaagtaatgaatctaaattccatgagacgtaaccattaatccgcatcggcagcactcgatagtaactgaccaattataagcttaaaaacattgatccacatgaatccacacgagaattggtccaattggattacaattaaccaagccaaagctcacctaagcacggatacagaaatctgtaacccacgaaacacgaattaacctagaaatcacagaccaacactcaatttaccaaaaaggtattagagtttctacacaaagcttgggctcaactctacaacctgcaaaattaacaggtaaaaagcttcccacaatcctcgtccccccaaccaacccagtccagctatctagatcagtagatctgcaagccccgccgataatcccctatcgtttcaatcgacgtttagccgtggaagggggaagagggagggagctcgcgggaagcgagaactcaccggagctcgggccgccgctcccgccggcggctgagggcggtgagacgggagccgtaggggagcgtcggccgcggcggcgcggtggggcggagctgttgccatggcggggtccggggctagggttggaagggcgcggcgcgagcggctgggatcctctggtggattcggaaggggagatggacatcaactccgcgcgggagctcggtgttgggtcaaacggcggctcgtctggtcggcggcgaggtggcgggcggcggtggcggcggcgacgccgacgcggtcacggtggcgcggcctttatacggtggtggttggggaagcagacacgacgaggacgcgcatggcttggctggaccaagtccacgtgagccgcaaacgtggaggattatagtattatactggtcggaaaagcaggtgggtcccacatgtaagtgtgacggaatctgtgagccgagtccatggaagctgtgggagggcttatggaggaggcgaatatgcggttgagttcgctggcgttgccgaaccgatgcgacggagctctccacgtgaggatgacgtgtgggcccagtgacccacgcatatggacccagcttatggaatggatgggctggacctttgcttgaagaaattagtatattttgcttctcctaactactgccctttgtccaataacacccctcaacaataaaatcggtacattacatcctccaactttaacaaccggtgcaaatcaatatttttagtagtttgcaaagtggtttttactgacatgataggttgatcgtgcttagactcactaagtcagcatgggctactgtaggacccatgtgtcaacgcccactcttcttgtcctctctctttctttctccaaaccaagccaacaagcccctccgagcacgtccacttgtgagtccgtccaacatctagctccgagaggctatgatgcaacaggaggttgatgatcgaggacggagatcacaacggcatgggagctcaacaacgcgctcattgcaccatccccaagtcggtgctctctccctcatctcctgcgctacgcacacaaggagctcgaagctcctagcgaccacctcccaacggtcggacaaggggctttgggaggaggtcaacagaccgaggacgaaggtcatagcggcacgggaactcgaggagacgctcgccgcaccatccccaagccgatgctctctcccctatctcctccgccatgtgcgtgaggagcttaaagcttccagcaaccacctcctagcagctagacgaggggctttgggaggttggtagactggggatagaggttgtggtggcacgagagctcaaggaggcgctcacctcactatctctctttcatcacttccctctttccacttgggacctagggagggaggcggtggcgaggtggagctgaggaaggcagtcctcccgaagtagtcaaggaagcccaacgagaggagacgactggtggaaaagagtcctatctctccaaggatagtggagacatagaagtctgggcggagcaggcaaaggccttaggcggcaacaggagctcggcgaggcatctcgccaaggaatgttgtgcatgtgcggcgccaatgcatcttggtgcatccatggtgccgcgggcgctagttgatgctaccgagaagaccacctcactcgcctcgccgccacccgagaaggtcgcgatgctctactacagcgacgaggccaccctctactccgctagcgacagtcgcgtccacctcgccaataggctcgcaagcaagcaccaccactcccttttctctccacctccctcgattccgcgaaccagaggaattcctcgatggcggcgaggagggcgagggtggcgacctcggcggcaacggcaaggggcgtggcgagggtggcccgtgccacaacacgttgggcggaggtaagtgccaccgctgcgtcgtccgcggagagctcatcgaggtggcactagggttgaaagcagacgattgaggaaagagacgacgaagaggcgttgtggtcaaaagtagccacggctacagtgccaaaggaattgggtggcagcaagggtgatgcctggtggcggctgtggcatgaccatggtggtgcaagctcgccggagtcgttggctaaggagtgtagaagaagaggaggaaggaggatgatccgacatgtgggacccactgtcattttttttttctgtttaaaatgccacctaagcaccatgtaggataaaaccatctacaaaaacatccagggagtcgatttgtaatagttttcgaagatggggaaggcgctatatccggttttggggaaagaccaagagatgagggagtcagaacagacttcttccttgctagaatagatcccggtggagagtggaggacgtgttaagctaggcctttgctaggacatttggcccattttcataaattcaagtaaaaacgaatgaaccaattccatttcttacatcaaacaggaaaaaagactcatacaagatgagaaaaatatcccaaagttaaacggcgattcttatttagcacatttgcgttcgcagtgcacattttcttttcctaaaaaacattcatctgaaaacattcgtccgaaaaactttcatctggaaacgtttgcctgaaatacttttataaaataacttttgcgttggtaatgcaacttcactaaagcagataaacattgctacgattcagatcgtcaagatgccagtaacaaccttacctttcctccctataaattacagtacaaaacaaaggcaacatctcaaatcaataacggtttctgaccgaacttcagaaccgggggtttacaaaagaatcgaattgccaattaatgatccctaagccaatctgtacaatatccccataaaaatgtcaccttctcctctctctcccctgctgtaaattatttcacactctacgtgactccgaacaacctgaattcctacgcttaattagcgttacatataggagtactagtatcttattcatatactgtatatgcctggctatagcttgtcggcgatccggccgagcgcgtcggcgagccggccgagcacgacggcgaggctggccgcctggtctcgccgctgctcccggtcgagccggctgttggcgttctgcgcctccagctgcgccgccaccatccggctgctccgatccaggatctccaccagcttgctctgcagctcgccgccgcggcggccgtcgtcctcctcctcctcgtcgtcgtcggctcgccgccgcttctgcccaccctgctgctgctgcgtcgtcggcggcggcggcggtggcgtgcctctcgatgcggcctgctgctccggctgcttgtctttcgacgtgcctgtgaaaaaagaagaatagtcgctgattggttagtagtgttacgatacttccagctcagatcagctgttcgtcacgttactttcggagaagattgtgtcgtctgatcatgcaactactaattaccaagtcttttcaactcttcgccggcaaaaaaaaaaaatggaagcttttttttttcaactgtactacacatcgagatgctaatgaaaactgcagatttgctcgtggaaataaaccaaaaaaaaaaagcaaacggattcgtttgctgctactacgattgatgacatattgacatgacactgaggaagtaccacgacgcgtatgatgaaacgataattaattaaatctgcaggcatcatcatctgcacagtacaatgcacatgaatatttcgtatctgcaaagaaataggttaccgatctaaaccatctcctttcatttgtcaaaacaaggcaaaggacacaggaattcacgcctcttcccagctctaaagattggccgggaaaacgtatttatctctcatctctctcattttatgtgtgtcatctaaatagtcattaaaaaaattaaaataaattgacaagattaatatgaaatatatcactccacatacatgtaagttaaaatttaatttttagtagacgtgcattgcaacgggtaaatactattttaattttattattgttatatcttttagttaaggtgaaatatactgtaagaacccgtttggatatatatattattttagaaaatcatgagctgcaattaggagtctgatcgtctcaagttagcatgcgagtttttaaagaaatctcttatacaattccttctgtatttacaaaaacaaacgaacttaaaaaccgacttaaatacggctttgtatttccaaaaagaacaaacttaaaaaccgactcacactcggataacgtaccaaagtaccgacaaaaacatcttcaatttgtataatagtataggcaagttataacaaaaaaagctgcgaatatacgataactattttcagtttaattcattttttttgcaacttatagaagttgaatttggcttttgcatgcttatgaagtgatgtatttcatagcaatctatgttgaggtgacatgcaagtaagtagaggatatccccttaagagatgaaaattcatatctagaggcaatgctgctactactacgtacaaccgtttggcaatgctactaatcttcaggtgtactcgatttgaagcactaaactaaggtattagttttgaatcagaatcatatcaaactgacccattttattcgaacattgcaaatttgaaatcctaaatgccgtgcgctaggaaggaaccgaaagccgtgttcgatatcaaggactgccaatacagagaaagcttcgagggacatggtaaccaccgaatcaattcagtttttggtgggttgccacttccatcacaccacaggggtgagtaaactctagttttggtttcaatggcccccacacggccatatatagctcaatcagttcatcatgcgaaagcagagtttgcattgcgttgcaacaattggttggacagagatgtagtttttgccccgaggagcccactgtttagcactagttgggctagtggctaacatgatggacaatctaggaaggtgaacagtgcaagtacaattgacaatttggatttcctttttcttttggtcttactgtgtgggttgaatttggatttaaattttaggataatacatatatattgtgcaaatgccattaaacattttcaaatttttccgtaacaaattacatgtgatttgaaagaatgacggggcaaacctctcttacgggataaaaaaggtttcccattctaggaagcatctgacagtttactagtaaaaccatttgctgataatcctgaaatttcattgctaagtgacatggtgaaagagatgcatcaagtgcatttgcaggctgcagctacctcctgccacccaaactgataatcataacatgcatcactaatctaaatcgcaattttttcgcctttttgtctacggactatgctgatcaagtcaatggaacagtaacttatttctttttcccttgtgcaacactagcaacaaatctggaaacaaggcagcaaaaggagagagctcgatcgagaaaagatgatgtaaaatgaagtgaaatccgattacctcctttctctgttcttctctggaaaaagaaatcacgaggaaaaaaaaagcaacatgaatcgatgaacctaccaaacgaaccatctctaccagaacgaacacgaaccagaaacaagaaagacaccaggcaaatcattcaaaccctcaccccaaaatttcaatatgaggacgcacagactaaatttgagcactggaagctcaaaattttgcggcaattcaagtcgtcaacgcaaagaggacacgctgaacaatctgtgcgatgggaaccggaaagattcccacctttttcgcgtcctatgaacagcgtaaacacagattcgtcgctcaaaagctaggttttgtagcaaattatttcccgagtttaccgccgaaaagtgctaagagttcgaattcatcgaggaggaggaggaggaagaggggcgagaactctgcttttatcgccaaaagatattgcaattttagcagcaaaaaaaggaaagaaagtcaaagggcagctcaccggatatcggcaaggcgatcaccgctcgaggcggcgcctgtgccgtcgcagcgacggcggcggcggtcgccggcggcgcctcgtcgtcgtcctcctcctcctcgtcgtcggagaacagcgactcttccgcggcggggcggccactgtcgaacaccgtctcctcggctcgggctcgcgtcttccccgtctcctcctcctcctccacctccacctccacctccgccgccgcgcgcgcgggctcctcttcccccgccgcggcattacctcctccggagggggagacgagggtgccgcgcccccggccgtcgagtatgtcgtacacctcccggtcgaagaaccccgggagccggcgctcccgccgcgcgtcgttccgcatggcccagaacgacggctcccgcggcggcgccgccgccgccgccgcgcgctcccactccttgatcttcttgtagtccccggcgaggttgctccaccgcttcctgcactgcacggcgcccctctccacgccgtgccgccggcagtactccgccaccgccgcccacttgggctccagcgccgccaccgccgcctcccccccagagccccccgccgccgccgccgcagcagcagcagccgccgccgcggcgcggcccctcccgccgcgcccgccccctcggccctccaccatgcgcttcccctcgatcagcaccagtatctcctgccgcgtccaccgcggcagcctcggcgcgcggccggacggcgtggcggctgccgcggccgcggccgccgcggcggggtcgccggcggtggacatgcgcggcgcgtgtgcctttctttttttttttttgtggcggaagttgacgtgacggcgtgaggcgggtggtgtaacggagagataacggcgaggaggggaggggacgcgtggggaagaagggaagggggagagagagagagagagagagagagagagcaaagagggcatgaaggaaggagggaagaggggttgtgtcttaagagaagggattaggaggattttggaggggttgttttagttattagacactcatcatgtggaggagatgagacatttatgtagtacactagtactaaattgtaatcaagcatccaagcccaaatgcccaaacttggttttattagggatatattttaaaatgaccatccataatttttttatacaaaaaaggtattgttcttctcatggcattttcattctcctaaacttggtattattagggacactttttaaaatggagagatggtaattttgattgtattctaaatttatgtgatggatttattctttattctcaacatgtgagttgtttacaaaagtagaattccttttgaacatcgacatgaacgaatcaggagactacaatagcttacatggaaaataaaatcatttatgaatgtccttatctttatgtctaaatgtttgatgacaatattgcttaggtgggaagccaataaggagcttttcaattaaaaggattagtaagggaggagggtcatgtgtattgttcaacagccatgggcttagaacaatgttggtatatccgtgtaggaatggatggcttaattaagtgatcaacttaggatattaattgccatagttgcagtcttagccacttccataagctagcttaaagaaaaaaaatgtcctggagggagagagttagttggggcttaaccagaggaatcggtgctaaataccaaatgcccatgatgcctcatatctccatgatgtaacaagcaaaaggtgttttggggttttggaattggagaaacctttggataacaatggtggacattgcaaggagtggtgctgccttaaggaggtggattaatttattgtgtgattaggacttgtgattagagcacaacaataccctgccaggctcctaccgtctctgtcaatctttgtgatgggataaaaatttcttttcttatctttattccacaccaaggggtttaatttggcccattttatttttttagtcaaaaaaaatgtacaggagtatttgatttgtctgtgtgctagacacgtgtctaccggaggtggaattatatgggaggccaattgctaaaccacatcaactagtggttagcactaaccctcttgaattagtgcttaaccttgcccctaatggctaaagttcacaaaaaaggatgaccacgttaggatgctgctactaagagaataagatgccagacttaattattcttaattaattgttcttttgtgaaaattgaaaaaaaaaataaagatgtaaggaaccagtgtatagaacatgtactatctgcataaatgccatgatgatgatatggttttgctcaaaattgtgtataggtgtgcatcatatatatatggtgctataagcaggttggacctcacctaatagagttgtataattagggctccagtattggtttagctgtccctgacctggccctttaaatttgaggaggtccatttccatgccatatggcatttgaattgacctcacctactgccaagttcctgtcaacatggttgtaaacaactacactgcttgtattttggtacatgtatgatgtatcctctagctttcccctatattattattgcagcttgtagaacacatcttaattagcactgcgatgagaatatggagagaagccccatgattgaatttcccttttcgatgcatgtcatgcaatagttagccgtttcagagagttagcttcgcactgataattagagagatcaattaattagtggaccaaatctagctaattcttgcactaagagccaaaaagaacatcattagggggccctttcgaacgcgaaaatttttcatgcttttgtactaataatgaaaattacacataattctgtgagagagttcttagaaaagagaaacttagaaaaaaaaatcctaaatagtaacagagttcttgatctcggaaaaaaaaagatatcttttctcctgtcactgtggagacactgtttgactttgattggggagattttataataattcccagtacggcaacaaaatcctgagaaaaaaaaggagagaagtaaataaaacggcggcaaatcaaaaggttgtgggagatttgggcatgatcctaagaggatatcgcccatagagagagagagagagagaggtcccaaaacgagaggcgtggctcttccattgttccatgcacctcgcttgcttgcttgctcgctcgctcgctcgagcctcctgtaactttcagtgtcaacttccccttttctgtgtgaccaaatgggcctctcccatccatctctcctgccctttcagccactacaagaggctacgcatcctgcaacccatttacacatatacatatatactccatccgtcccataaaaaaccagcctagtaccgaatgtgacgtatcctaatactacgaatctagatatacatatgtttagattcatcgtactataatatatgcaaatatatatatgttacctctggtttcgaatgtatgtaactgttggccagtacaacaaaaattttaactgtgaacatcaataaacattaaatggttatacgtcatgacacatggaagttttatggctattttgtttattttttttaaacaaaccaacgttatataaaaagaaaaaaggtatattttttctttaattatatgtgtccatgagatgagacgatgacctcttcttcctctagctggatgctgatgtttccattgcgatgtgccctagctatgtgtgggggagggaagggagggcagttagtagctttgcaagctagctgatgggtggataggtcatggtgatggcaactgctttcattagaaatgaaatgaaagaaagaaatcaagaaagaaagaaatcgaggatgaaagatattgagatagggcaagatgaggtgtgacaggtgcctctcttgttggtgccttgccatcctatcccatgttgacgactcatcatcgatctcgatcttgtgtccgttttgactttgttttcctcctttttctcctccttttgcatatgtataatccactgcaaaattaaaatatagctgtgtgtatatattagcatatgcgcacgtgacgtgacgacgtctggtttttctctattccttccttgatgttgttgtcacgttaattttaataatttaatggttcttggtgtacttcctgatacctctaaattcttttgttggtttttattatatctgcgtttgtgcggtaacttcttgaccgcaaaacaaaattgaagttatccaaaatctcgaaaatttttaaaacacaaccatacggatgaaaacatactgatactgattggaattgaacccgacagtaattctgaaaacattaaactatatataaaaaaagcacgtatctaactgtcgaaactagatttcggcaataataaaagggggtggctatcaagctggaaaagtgtatgggtttggagacaaaagatttatacaggttcaggccttcttataaaagaagtaataccctactcctgtccggggatgaatccgccgagtgtattattgattgtatgatttagagaaaatcaacatctgcccctagaggcgcccggaccccccttatatatgggaaggagtccgggttacaaaagataatcaatatccctaacggaatacacagatatagattaaatacagccgtgaccgactaagtctcaaggtgtttccttgttgtacaagtcaagaaacaaacccgagatacaaataagatattctatacatattcggtatcctatatccagcccaaatagtatcgccgtgtagatatgggatatccataatctccacagtagcccccgagacctttgcagtcaaccatcgtagccttctcaaagatagcaatccgagtgcttcagattattcatgccaaggcccaccgagtagcgaagacgaagactgtaaagggcgaaaagataaagaatatggtgcatcgaatagatgcacctaattaggtgtagcccccaactatgtgattagttaacaaactaaacatatagttgagaacaatataataacacaatcatgcattagatggcaaaagcatacgcgtcgcctaaagaggcattctagccgactgctttttagccataataaaaagaatccgagtggtttacactcgaaaaggttcacgaatgaacacactggacaggcatccgaatataaaactataaagattacccaccaaatattataaaaattatggtaacaaaaagactaatagcctaggctatgtcaagttaccacaataaaaataggtatataacataccaaggaaatgactatgataaaaacaagtcattccaagttaacccaaacagcttttgtagcctaaaaaagcttacaaaaacagcataacgcttttctgcagggcaccttttaatttgcattgcaataactccaaagaattatatgaccgcataaaaaggattttgtcagcattgggcaacactattgtgtgcataaatattgccaaagcaaaatatgcctaagtccctaaggaacacaatgggccacgctgttaaaagtattgggctgaggtactgttcaggcctaggcccatttgcacctccgatacccttaacaaaaaatccgagatccaagcgacgcttcgtcttccccgccggaacgctcgccattttccccactccttgctacagtaaagagctgcgccggcgaactagggttcatcaatccgtccaaatccaccttcgaaaagtgattaaaaatccttcccgtgatccaccgcctcaattcctcacctctcccaagccatccatcaaatcaaatcagcgcattcgggtaaaatcgatggcggaggagaaagaaagctttgaaggccaatgggcgccatccgacgtaacggaagagaacttgaaggagatggtggcgcacggcgttctcccagccaaggagatcatcgggtggcggccagcgtgcggtgaggcttttccgacccctgatacacatgagatcgtagtcttctcgcatttcttctatggcggcttcgctcttccgacctcgaaatttttccgcgggatcttgaacttttatggaatcagcttgcatcacctaaacccaaattccatagtgcatatcgccaatttcgtccatgtttgtgaagcctttttgggaatcaagcctcactttgccctgtttcgccggatcttcttcctcaaaccccaaccgaacaagagcaaaccgtgcgtagtcgggggggggcaggattccagctaaggggaactctgagccaaaaatacttctctatgcccttcaagacttcaaacaaagggtggcatgcaaactggttctacgttcagaatcctgagcctgctcttcccgggtactcttgtcttcctccggtgtaccaagatacctggaactcccttccaatcggagatgaagcagtccaagccttggagttgatggaccgcatgttaaaactcaaagaacaaggtttgcaaggagagcagattactcggcatttcatcaaatgccgactggcgccaattaaagaaagatcccgtacagcttttgagttcgacggcaagcatgatcctaaccgtgaagaacctgactctctggatttcaaaatcatgaaggagagaatgtataaaatcttctcaaatgccattgtcgttagctactcacaccagctgccagttgtgccatataatgcattcaatccgcctccgcaggtatgtatctgaaatcttcaacttatgaccaaaatagtatcttgtcttcatgttgaattaactaaccatggaggcatcttattcaggaatatgtattgatgaaatccgatcccccaattgctcagcgacgatctcctcgccagcacaccattcagggaagtggagggccgacaatcatgtcagacccacaacctcaaacctccaaaccggctgggcagacaggtcctcgcaagagaaagctggtgcttgatgacgacgagggcgatgacagcaacaaatctggggacaagggcacgcccaacaaactcccgaagcataccatgcccaggaaaaaactggctggccgtcaaatgccaaagattagaacatcttccaggtataaacctctcgataccattttgtttcggcatgcttcccttatagaaattatgctaaatatcgaaagggcactttgcaggaaaccgtccgatatagatccaaccggaaaagatcctgatccggctgtgacagaacaaaatatatccaaggacgctgagccgactgctgaaagccagccgactgccgaaagccggccgactggcgcccatgcttcggatgacaaggccaatccgagtgaccagccgccgactggaaaccagtcggcaacaactgaaactgcaacaacccgagagcccccaactggaaaccagtcggatgtaggtcctgatcaagaaatccctgaagttgaagcgcaagcgacatcttctcaaggaccagaggctggaaatgactcggtggttggctctccagataaagaacaaggatcatctcgcgctcagccaggcacatcctcaggtaactcatcttctcaagtgatatcgttctgaataactccagcttgctcgtctaatgtcttggaaatacatcaggaacactaggcgatgacgaagaaacaattcctcgcataaaggcggctgatgactcccgtccccctatcttactcaaatggtgggacgagaactctcaagtttccggcattgttataaatcgccaaaaagaagatgaggaagtgtgccagctgaagaaagcacttggagaagccactcgcattgtgaatgtaaatcttccgggtgactgcctttaataactttgttttcttgttagcaaaactaatccatgaaccaccgtgcagagaatccatcttcgtaatgaggccaagactgcaaccttagaaaagctggttccacatttgggaactcttgaagccgttagggaacagctacacgaggccaaggagtatgccaagaaaacggagaaggaattaagggaacgaattgcacagctccaggactccaacttcgagctgagtggttcatcaaaaggtaatctctagatctgtcccatttatactgtcatagctggatcctcaaacatttggatttcaaacagcgcaagccaccagaatggcccagatggagaaacagattgaagccttgaaaagagacaaggtagaactggctgcgaaaagggactcagccttgaaggaggttgaaggtactgccaactgacaatttgaactgtcctctctttaatgcagcagattcttattataaatgtattttgtagaccgtaaaatcaaatcgcaagctcagtttgatgtcctggttggtaagatcaagaagcttgaaggagcaagagacgaagtcgccaatgtcgctacaccactcgtccaagctatgttccttaataacagtggtccgagtgcacttgacgcaaccgaaatctttgacaagttaagagttgcaccggatgtatacttcaagaacatcaagaaagctggaagcatgggagctagcatggcattagcgatgaccaaatccttgtacccaagaattgaaatcgacaccattgatggatttgcagatgggacaagcgaagaagctgctcttgatcttatcaacaatgctcaaaatgcggctgacaagattgcaagcgatgtggtagatcaattccgcaacaacaaccttcagccgagcaacgataactctgatgatgaaaggactgattctgactgagtatgattgtaacaaatggaggcataatttgtactatactggtgtatttatgctgtgcttgatagttctagccaagtctttgatttcttaaaagtttttatcaagctttgttgagcctaaaacccaaataagctattaaaaactttcagtcctcgcaaactaagtagaaaaaaccaaacaaggcaatgatagaccaagtaagcaaattaaattgataaaaaatcacactccattattataatgatagcccccgactgacaacttcaagaagaaaacttgatgttgacagtcaagatagggaagtacaatgataaacttaagcgtagaaacgacgaagatgctcaatgttccaagagttgtcgacaagagtaccgtcttcgcgcttgagtcgataagaccctggccgggtgacttcagagataataaatggcccttcccatagaggagataacttgtgccgatctcgtgtagtttgaattttcctcaaaaccaggtcaccgactaaaaaggcacgagatcgaacattgcgattatgatagcgccgcaacccttgtaaatatcgagccgaccgaatcaaagctgcttcgcgggcttcttccaatcggtgcaagtcatccactcggtcctcttcgtagcgttcttcacggaaatttcgaaagcgcaaagactcgaattcaacttcactcggcaacattgcttctgccccatagacaaggaaaaaaggtgactggcctgtggcccgactgggtgtagttcgcaaagaccaaagtactgatggcagctgttgcacccatttgccggcatagggttttagccggtcaaaaacacgcgctttaatcccttgaagtatcatgccattggctcgctccacctgtccattgctcatggggtgtgccactgaagcgtagcaaatcttaattacaaagtcttcacaaaagtctttaaaaactccgccagtgaattgtgtgccattatcggtgatgatccgattgggcactccaaatctatgcacaatgctgatgaagaagtctcgagcattgtccgctgtgattgtgacaaccggtttagcttcgatccacttggagaatttatcaatggccacaaagagatgcgtgtaaccgccgactgcctttttaaacgggccaaccatgtcgagcccccaaaccgcaaacggccaagacagcgggattgtttgcaactcttgagctggtagatgaatttgtctggcgaaaaattggcaaccttcgcacgtgcgcacaattttgtcggcgtcggacactgcagtaggccagaaaaaaccctgccggtaagctttgccgacaatggtgcgtgcagcagcatggtttccgcatatcccagaatgtatgtcttttagcaattgtctcccttcctctaaagatacgcagcgttgcagaattcctgaagggcttttcttgtataactcggcttcatgcaaaacataaagtttgctccgccttgaaatccgctcggcttcatctttgtcttgggggagttcttgagaagtcaaaaatcgtatgaggggctctcgccagtcggcttcaaccatagctacgtcatgagtgtccgcatcttgagtagtatctttatgaggtacggtcggtgtataaaggtgttcgacgaaaacatctgagggcgccgcctcacgcttggatccaaaattggcaagtctgtcggcggcttcattgttgtgtcgaagaacgtgactgagctcgagtccatcaaatttgtcttccaatttgcgtacctcttgtcgatatgccatcatgttgtcgtcaaggcaggaccactctttcataacttggttaacaaccagctgtgaatcgcctcgaactattaaacgctttatccctagggaaattgcaatccgtagcccatgaaggagggcttcatactcggcgacgttgtgggacgccgaaaaatgtatccagagcacatagctcaatctttctccagttggggaaatcaaaaccactcctgctccagtgcccgaaagtcgtttggatccgtcaaaatgcatggtccagtgctccatgttctccgcgggggtatcctcctggcactcggtccattcggcgacaaaatcagctaacgcttgggacttgattgaaattcggggcttgaatgatatgtccaaagacatcaactccaaagcccacttagcaatacgtccgtttgcttcgcggttgtgcagtatatcaccgagtggaaatgatgtaaccaccgttaccgagtgaccttgaaagtagtgagatagcttcctggtagtaattagaataccatataacagcttctgaacctgagggtacctcgttttggagtcggctaggacctcgctgacaaaataaatcggtcgctggactttttggacatggccttcttcctcgcgctcaacgaccaaaactgtgctcacaacctgggaggtggctgatacatacagcaacaacggctcctgcgggtgtggtgaggctaagactggtggctcggtgaggagtttcttgaaatcttcgaaggccttctgtgcttcgggtccccactggaagttatctgttttcttcagtagcttgaagaagggcatcccccgctcgccaagtcttgaaacaaatcggctgagcgccgccatgcatccagtcagcttctgaacatctttctgggtacttggcggtttcatgttgaggatagcagtaactttctccgggttggcttggatgcccctatgagacaccataaagccaagcagcttccctgacggtactccgaaggtgcacttttcagggttcaatttcatcctgaaagcacggatgctcgcaaaggtttcttctagatccgagatcaaatcatccttttgcttggtcttgacgactacatcatccacataggcttcaacgttgcgaccgatctgcgttgagaagcatctctggatcatgcgttgataagttgctcctgcgttttttaatccgaacggcatggtgacgtagcagtatgccccaaagggcgtgatgaatgaagtcttcaagcagtcggattccttcagtcggatctgatgataccccgagtagcaatccaaaaaactgagaagctcacagccggcggtcgagtcgactacctggtcaatgcgaggcaacccaaagggatctttgggacaagacttgttgaggtcggtataatcgacacacatgcgccattgccctgttttcttccgaactagaaccgggtttgccagccagtcgggatgaaggacttctttgatgaagcctgctgctaacagcttggttaattcctccttgatcgcgtccttcctgtcttgtgcgaatcggcggagtcgttgtttgataggcttggcatcttctttgacatgtaaggagtgctcaatcacctctctaggaataccgggcatatccgaaggtttccacgcgaagatatctttattattctgaagaaaggtgatgagcgcgctttcctatttacaatctaactcggcgcctattacagcggttttagtaggatcagagggatctaggggaatctttttagtcttggcttcgctttctccactttttgaagtcttggtggcaggtatttctccttcgctcgccgtggctgcagccagtcggatatcctctcgggcagacgccatctcgcgagtttgggccatgtcgcaactctccttgtcgcatgtgacggcttgcttgatgtcgctccgtagggataggactccacggggaccaggcatcttcatcatcatgtaagtgtagtgcgggacggccatgaacttggctaacgccgggcgtccgagtatggcatggtatgctgtctcgaaatcggcgacttcaaagctgatattctctgtgcggaaattttcccgagtgccaaaagtgactgggagggtgatctggccgagtggagttgcggataatcctggaattactccgtgaaaaggcgcattgcttggttttagctcggagcgaggaatctgcatatcatccaaggtcttggcgaagaggatattgagtgcactgccaccatcaatgagggttctgtgaagcttgacattacggaccactgggtctagtaccagggggtaccgccccgggtggaccactcggtcaggatgatccgagcggtcaaacttgattgcaatctctgaccatcgaagatactggggcgtgtcgggctgaacagcattgatctcccgttcagtcaacttctgcttccgtttagactcataagccagggggccgccaaagatatggttgagctccttgcggtgatcttgaaaacctgccggggtgtcaccgtcgtccttcttccttgacgtgctttgttcttcgtcagaattcttccgtgcagtcttggtgtattgatccgcgaattgcttgtagatgaaacaatctttggccacgtggttggagttaggatggtgcgggcattgggagttcatgatcttgtcgaacgtgttgacgcgcgaacgctgtcgagaagagtgactggcggttgcaacaagttccgcaggcttacgcttgcggtccttatgattgttacatccacctcctcccgtagccggcgtacccttgttttgcttccaactcggacccgactgctttgatgcggtgacagcgtcttcagctttggcgtactcgttggctttttcaaacatgagcttgactgtcctgggaggcttgcgcccgaacttgccgaccaattcttcgtggcgaatccctttggtgaatgcggcgatgatgacgtcgtcggtgatgtcggagatcttgttacgttgttcagaaaatcgccggatgtaatctcgaagggattctccggacttctgaatgacgttgtaaagatcatattgtgtgccgggacgctcgaaggtgccttggaagttggcgatgaagtggtcgcgtagttcggcccaagatccaattgtaccacggggcaatccatggagccaagatcgggcggaatccgctaaagccactggtaaatagttcgccatggccttgttgtctcctcctgctgcgcggattgcgagaccgtagacggtaagccacgattcggggttagtggtgccgtcatacttctctattccagtcggtttgaagccggctggccaatccactcgacgcaggtcgtcggtgaaggcatcttgttggccgatgagatcacgcgctcggcgccctgcttccaaagctcgctgacgtcgatcctcagcctccttcgcggtccgctcacggtcctgctgctcacgccgtagccgttcttgttcttgtgcctgatgctcctcctccagtcggcgacgttcttcggtctcccgggcttggcgttgctcctccgtctcattattggccatgaaaacgccaaagtagagaggggtatagttgtcatctaggcttccgtcgaagtcgtcgaagtcgttgaagtcgttgtagcgagaactaaattcgtcgtactccacgatgtcagtaggacgtgagtcgacggtgggagagctgttgtagtcatctagctgatccgtcgaaaccgtgccgagtggttggaggatgacgccgacttccctgaagctaggcgaaatcggtgttaaggccgacttccgcctaggcctacgggatgaagacgctgtcgtggtagagacggccgctaaatcgtcggggagcttcatcaggactggtgggtaagccccatcatcttgatctggtgtcgttggagaagatgcgatctcggtcgagtggtttgaagccgactcggttgagatggtcttgaagtagctttcagccgcgttcgggaatccgaacgggaccgaaatccggttctctcccgactggtttgactccgagtctaggagagagatcttgccgaagttgttggtgatgaagtcgaggctgccgaaccgaaacgtctgcccgggtgggaagacgaggtcgtcgatgccggagacggaacccattgcactgatcggcgaaaagcttgacgctacccctacctggcgcgccaactgtcgaaactagatttcggcaataataaaagggggtggctatcaagctggaaaagtgtatgggtttggagacaaaagatttatacaggttcaggccttcttataaaagaagtaataccctactcctgtccggggatgaatccgccgagtgtattattgattgtatgatttagagaaaatcaacatctgcccctagaggcgcccggaccccccttatatatgggaaggagtccgggttacaaaagataatcaatatccctaacggaatacacagatatagattaaatacagccgtgaccgactaagtctcaaggtgtttccttgttgtacaagtcaagaaacaaacccgagatacaaataagatattctatacatattcggtatcctatatccagcccaaatagtatcgccgtgtagatatgggatatccataatctccacactaacttaatatgactatattatataatgatataaatttaaagttacactatgtaaattacaaaatattacccctttagccatatactcaaattagggatttggttgagtagttgatggaccactaaagtatgggccaaatagtaacatgaaccacagatactgggtatttagaaatacagtaactattgtattgtagaaatagtaatatccataaaaaagtaaagacaatgaaatggttggtacaacagttccgtttctatatttctttaccatttatattttcattctgtttggttaatattttcatataattcttttggcaagagttaattgaaatccaccacaattttgatagggtagctagggacggaaaatatatatgttgctcgatttgataggaaaatttgtgttatgagcatatgaacattgattgatgttctttttttgttcagagaattaaactaaccctacatctgcatgcttcactagagaatattcttcgactctaaacttgaattttctcatttttcgttagtatatggttttttgcaaaagttttttttctaaatagaagttgtttaaaaaacttaaataatttttttaagtttataattattaatacttgattaatgtgctaatgagttttctcgttttgcgtgcgctaaaattctatccccaaatgaggtgatcgaatagagctttcaaataaaatctctcatggtccctcaataaaaaaaagggtgaaacttgccggtaaaacgaatttgaaaatctccagtaaaccactcacctcatcacctacctctgttaatttctgttttgtttggcttgtctttccaatggagaaaaaaaactaaacgaaagacaaaattgtaggatcgaaagacaagaactaagccaaccagagggggggtgaatggttggtatacccaaaaaccgaaaacttttagcgaaaataaaagttaccctcgaaatcgacggaagtcggtctgaccgagatttatctgccggtctgaccgaagcgtagccgccggtctgaccggtgttgatcttccggttggaccgccctggaatccctgtcgcgcctgttgtcaccgccggtctgaccgcaggtcacccgccggtctgaccgccgcgatgccgccggtctgaccgtcggtgtgtcgccggttagaccgccgaaacccggcgaaacacaaatcgaagaactctaaaagtggatgacgactttatcaagtcatgtgttgcaataaaaagaagataaacccatctataatataacaagcatgcattaaagtataaccatgaaccaaagattttacaattaagcttgaatcaacaatcaaaattcatgatttcatatgatttataatgcaacatcttaacaagcacataggttgaagaataaacactaaacacatatacctattgcatttatcactctttctcaaataacctttagcacaaaataaccaagagaatttttttaaccttttcttttcttgagcctttttgctcatatttttctcttttattacgggtacgtccctatcgtcaagactgtttccagggattcggctccaattattttgctcacatcgaatacgtcctcgtcgtcaagaccgtttccaaggattcggtattcatttttttcatattttttattctctttttcacaatgagcaattaaagctatttgaggaataacaattcaataaagcatatatatagagcatttataaatcaaaccatatgctagcatcaacattgcatattttcttaattcaagtagaatttaaatgtcatgcatcatctcccttaaaagcaaaatctaaatctcatgaaaagactagaatacatacaagctatgctagagacaaataaaccttcaaagtattgctagcatgcacaagaaaataccatatgcataaacaaagctctcttttctcaatttttctcattgtcatattattgcttgataaaaccatgaggtacaaactccccctcaaaccatgccaaaaggatgaattatgcccaattcaccatgaagaaaagcaaagcgattagaatccaaaggtttagtgaaaatattagcaatttgcaactttgtgtccaaaaactgcaattcaacatctctcttcttaacatgatccctcaaaaagtgaaaacgaatatcaatgtgctttgtgcgtgagtgttgaacaagattcttagcaatgttaatagcactagtattatcacaaaagagaggtactttctcaaaagtaagaccataatctttcaaagtggataaaagccaaagaatctgtgaacaacaactagcagcagcaacatattcagattcagcagttgattgagcaacactagattgtttcctagaagaccatgcaatcaatgatgtaccaagaaaatgacatgttccactagtacttttcctatcaattctacaaccaccaaaatcagcatcgaaatatccacttaagtatatagaagatgaagtagaataccaaattccaaactcaagtgtatgattcaaatacctcattattcgcttgaccgcttgacgatgtgaagcacgaggagaagcttgaaagcgtgcacacaaacacacaacaaattgtatatctggcctagaagcagttagatacaacaaagatccaatcatacttctatattccttttgatcaacagcttcaccatcttcatcaggatccaacatagctgtataaccaattggtgttgaaattggcttgcaattctccatcttgaaccgtctcaaaagatcctttgtatacttcatttgatgcacaaaagtaccttgaggtgtttgcttaatttgcaatcccaaaaaagtacgataactcacacatcatgctcatctcaaattccttgcgcatagtctcagcaaaatctacaaccaaagcgtgagtcgaaaaaccaaaaatgatatcatccacataaatctgaacaaaaagttgattatcaccatgcttaaaaacaaaaagtgttttgtcaacctttcccattataaaacctttcgcaagcaaaaagttcttaagactatcataccatgctctaggagcttgtttcaaaccatacaaagctttagacaatttaaaaatatggttggaaaaatcaggattttcaaaacctggcgattgtttgacataaacttcctcctgtataaaaccatttagaaaagcacttttcacatccatttgatacaatttaaaaccttttgaagcagcaaaagccaacaaaagtctaattgcctcaattctagcaacaggagcaaaagtttcatcaaaatccaaaccctcaacttgagtaaaaccttgagcaacaagtctagctttatttctcacaatcaaaccatcctcattttgtttatttctgaaaacacacttggttccaataatattatgtccagaaggtggttcaactaaagtccaaactttgtttctctcaaaattttcaagttcttcatgaatggcgttaatccacgattcatcggttaatgcatgtgacacatctttgggttcaaaagaagcaacaaatgcagaatttgcacaaacatcatgagtcgttaccttagaccttgtagtccgctcacctatattaccaatgatttgttccggcggatgtcgtcgttgaatgtgcaaaggagcatctcgaacaacatcaacagaaccctcagccgacgaccctggccggtctgcccgcacctcctgtgccggtctgaccggaggtgtgacggtggtctgaccggcctggcgcccggtctgaccagccgagccgacctcctcgtcgtcgttgtcgtcgctctcgtcttaaaaaatatgaccatcctcctcctgaacctgtgacagtgtacctgcaatatcgggtctagtacctggactagcctcatcaaaagaaacttcgcaagtctcaacaattttgtttgtctccaaaataagtacacgatagccacgagtgtgtgcggggtaaccaagaaataattcatcggtagaacgtgcctcaaacttatccaaatttccagatttcaagacaaagcatttgcaaccaaaaacacgcacatgtgaaactttgggttaatgtccaaatcgaagttcataagaagtttttccaagttttgatttcaagaaaacccgatttgaaatataacaagcagtgttaatcgcctcagcccaaaattttctaggagttttatactcatccaacatcgttctagccatctcaaccaaaacacgatttttcctttcaacaacatcgttttgttgaggaacacgaggagaagaaaattcatgttcaagacctctttcattgcaaaattattcaaaagaagcatttttaaactcaccaccattatcacttcgaattcttttcaaagaaccaagaaattcaagatccaatcgaagaaacaaaccacgaaagtgttgaaaagcttcgtccttagttgccataaggaaaacccaagaatatcgagaaaaatcgtcaacaataaccaacacataccactttcctccaactgattgcactctagctggaccaacagtgtccatgtgtaatagctgtcccggtgcatccgtcatcacagaaacaataggagcatgtgaagaagcaaccatcttagcatgacgacacggtgtacaaaccaaatgaagatctttcttaagtttaggcaaaccacgaacaagatccaaaccacttaacctagtgagatgatcaaaaccaacatgtccaagtctacgatgccaaaacatcacatctttatcaaacttagcaaccaaacatgttatcacaggtgaaccaggattttcaaaatcagctttaaacactcttccatagcgagaaatattcaacacagaatcaccacaagaatcaaaaactttacttccagttttcttaaagtgaacctcaaaattttcatcaacaatttgtgaaaccgaaagcaaattgtactttaagtcctcaaccaaagctacattctttaattcaaatttttcatttaccttaaccaaacctatagcgagaacgacacttgtagaagcatcaccaaagataatcgattcagtcttggatgccttcttgagtaaggagaaccaatttttatcaccggtcatgtgccgcgaacaaccggaatccacgatccacacgttctccttccttgccaccaaagcctacacacaagcagaagtcgaagcctcagtactggggttagatgataataaaaatttaggaatccagtactgaaacacacgaccagaagatccaataagcatatatccacgtgcaaaatcaattttagaattttcagaaaaattcctccgaggccggtctgaccgaagtacagtggccggtctgaccacttctgtaccaccggtctgaccggtgcccggtctgactgacgctcagtagccagtctgaccggtcaccggtctgaccacgggacccactgcggtctgaccggtttcctcgagggaaaacccgatttttgccactttgattttacaaaagcaatttctctctcctttttctgtttatgggctaatctgaaaccaaaaccaacaatatgtccaccttttccacaaaaagaacaagtatatttttcacgatgattagacacattggtagcattagaagatttagcaacactagcaacaacatgaggttttgcatgcacaacattggattttgaagaagatgcactcatagtagacatgataccagcagatttaaacacagttttgttagcattaggtttaaccaaaatctcaccacttctagcaccaacacctaacacaacaggaggatgtctagaattataagcataaggattaaaacctaaaccacggttatgtgtgctaacctttgattgatccaaaatcatgttgaggttctttttaccatcagaaaatcttagtaaggaatttttcaaataagaaacctctttatccaaattagcacaattttcacaatctaccatgacacatttgcttttacgacatttagggcaagaaagcacttcattgtttttcacaacatcttccatgaactcaacatgacctaaagcatctttcaatttcaacttattcaaattacatgttgagcaatccaaaatatcatgaggttgttttaactttttaacagaaatcatgttaaacatcaaactagcatgaaaagcaatttgatatttttgcaacaactttttagttaaaaataactcatccaaagtgcgtgtgtgcaaagcaaaactacaagcaagagaagatctatttttcaaatcatgtgcagcattaacatctctaatttttgaaatctcattcattaaaacctcacaattttcgtaatcatcatcattaggaataagagattttaatctagcaatttcagatttaagagattcaatgataaatttctgttttctagacatcttctcacacttcttattcttttcactcaaaatattaatagcttcctcaaaagcacttacctcattatcttcatactctgtgtcagattcaccacgcgccatgaagcaaacatcggagatgctctttcccttatcatcatctccactttcaccatctacatcacttagcgactcgaaggcggcgcaaacttgttgaaaagccttcctgagattctctagcttcctcccttgggatgaacccttcggcttgttgttgttgttgttggtattctcaccatctttgtcttctcttttgcctctcccaagcttaggacaatgcgaacgaagatgatcaattgaaccacactcaaagcaatgatttggaccacctcttttcttgttcctggcattatttatagctcaagcaattctattagcaaccaaagccaaattctcctcctcgatttgttcgagttgatcattgtatgtggcattaaaaacagcaagaaaagaaggcttagatgaagaagcatcaacatccaaagaagaagaagaagaaaccaaagcactcgacttagaatcaacttcccgagaaagaacattcatctcatgtgttttcaattttgtgtaaagtgaatccaaagtcaaagtagacatattaacagactcctgaatagatgtaactttcatctcccaaatagacatgtcaagaccattcaaaaagtgacgagaaatatcagattgtggataattagtatcataagaagaatcaacagatttaagatcactcaaaattttattaaacctagaaagatagtaatccaaagcttctccaggtttcatctcaaatttaatatactcctttttgaaaatatcacgacgaagttctttaatgttatctgttccttgatgaaagttactcaaagctttccaaatttcatgagcagttcgaaagtgcgcaacacgatcataatcagaaagagaaataccactcaaaagaatgttgcgagctttgcaattttgttcaaactcagtttttaaagcagcagtattaatctcttcaggaatcacataaggatgagaaacttttctctaaatatcataatcttcagccataatgtaagattgcatcctactacaccaatgagaaaaatccgttccatcgaaaacatgaggcttagttgaaaacctagcaggagtagccatggcaaaaactctagatcgataaaaattcaaagaagaaaacaaggctctgataccacttgtaggattgaaacacaagaactaagacaaccagaggaaggggtgaatggttggtatacccaaaaaccgaaaacttttagcggtgtcggagatatgggcccgggggtatgcgaagtgaggggaatctaccttcccatcctgccacgcgtccctacagcctagtcctgtccccgcattccgcgaaccgcaggagcggccggggggtcggggcctcggggtgccacgtcatgcccctcgggcccttgcactgctttgccccgaggctctcgcccagctgccatttggcagggggagcaagcgaggagggggcccaggctgaacttcctttaatgcgcacagcgccccaactgccccctgtcacatttaatgcagtggagcagatgtgcggcgtgctaaactgacgcgcgatggtcaagaatgaccggtctgtgaccggcctgacgccggtcacgtctgactggacggacaaccgtgctcccacgtcgcatctgctttcggcggagtggaggtaggtatgacccgtcccatcggagggtcattcgggcggcggccaccacaagtcttcacctattaatgagggaatgacagggctgtcccccatgtcaggcgagggacggcgctgggccccgctcaaggacaaactgtggtttagctttcaggcgaaggcacgggtcgagttccagtcaagttagggtgggtccccacccgaaagaagagtaggtagaggcggtgcatgtggtatccccttgaggtataaaaggaggactttgcccaccgagagagaggacgactctcagaaaacctgagcttgtggaggagggaagtaagagtgttctgccgattttaggaacccttgtaactcttagtctaaatcccatacacaggagtagggtattacgcttgatagcggcccgatcctgtataatttgattgtgtgcgagctagctaggagccttggggacggatacgcaatttctagaggcgagcttcttccctcggccgaactcatgaaagggggggtctcacgatctcccgctagagaggatcacccctcaacaagcggaaataaaagttacccggttagaccgccgaaacccggtgaaacacaaatcgaagaactctaaaagtggatgacgactttattgattctctctgtgtttacaaagtgcaccaacagcactccttacataaatttcgactaaactcgaaaccctaactcaaaactcaactcaattgctctccaaagcgataccgggaagcctcacgctccccctctatttatacatgaggcgggcagcctaaagccacgaaccaaactcatactaggagtcctaaacaccttaggaaaccctctagtacaagaaagaaactttacataaccaatcgtaccaaatttggactccttccaaattcaactccgcatcccatacgcacacaatacctccatcgtatgccatatggaatctccatcaaccacgtgcatcaactctagcctaagtattccgcatgatctctgaccaccacggacgtcgtcttatccccaagccgattcccgatccatcaccgcaaatactctcccgaggcattgagtcacctacacatgaaataaacaaagaaaccatattccgagaccaagctatctccaacttgactcattagtagcaaacagtagtattacatacgtatagtatccatctagaagtcataatcatgaaataatcacggatatccaaacaaacaacccgaaaccgaaactgacacagcgtcggccggtcagaccgcgggctgcgccggtctgaccgcgcattacacgccggtctgaccggttaccagagcccggtctgaccggtcacataaaatgacgaatcctgcgatcacctgtgaaatccaatcatctctaaaaccacttcatgaataaataccaaataacaaaaccaataatctctaatgccaattgttcatcacagaataataaccaaaaacacctgtacacatggcgagtggcgctgtgtgaccattgtacgtatacgtaaggatgacgctcttgttgatgcaacgaccgcacgtatacgtaacgctaatgcatgaagcatgtcatcagagtagctaattaaaaaattgccacgtatcctcttaattaatcgcacctcttgaccactatacaattaattaactcagctaaatatactgcttaatgtcatccactactgttgctgctggaggcatatatatccatatgcatctatacttgtatgttactgtatcaattgctaaattaatgacacatcatgattaatattgtaacatagtgattaaccaccacgtgttagtccattcacaattagatcttgtttggaagattgccggagattcttaaaaacatctagaagagatgtgtttttcagcttttacttatctattggttaaataaatttggaccatttagagaacctcgggagattttggaaaaagctattaaaggcctagaactgtgttatatttttttcagatatataggggcttagaataaaaaaattgtccctcattatcgtgtggggacacaacgcgcgagagagagaatggcgcaatttataagctagtgtgcagtgttgtattcacatccatatgggagtggagatcggaggaggagatgatcgatggattgacatattccaaagctgagcacaattaggacacgagcaagtgctctaggggatcttgtgtactcgatttgggaatgattaattcgtgggtggattagtgccacccacagctaagatagggtactctatcggtgcgtggctgcatatatggtggagggattagctatccagccatcaatcggacactgcttttttttttctattaacacataaatactcccatatttcatattataaatcattttactttttttcttaatcaaatacctttaaatttgatcaagactgtggaaaaatatactaacatttttaatacaaagcaaacatatattatcagaatatattcaatgttagattaataaaactaatttgatattgtagatgttgctaatttttatataaacttaatcaaacctaaagaacttggactaaaaaaaattaaacgacttataattatatataatatgaaacggaggaagaagtatatatacaccaccccacgagcacacgctatatatacacacacactagtatgtgcacgattaatacatgttcaagacattgagaactaacgtgatcattttacttaaattcctataaccgaagtgcacacgcgtgtataggggccctttgaaatggattggcaaacaactttagagaattcaatttcttctaaggatcttttttttcctatggaacctttgattcataggaagaagatagaaaattttctacataattgcatttctatgatctataggaatacgagtaagagattagagattagacctcttgtaaaacttacttttggcttaatttctttttgtgcaatcaaacggattctcttcttatttcatgcattttcaagtcatgcaggattggaaaaactgaaactttaatttctgtgttttttctgtggtgtttttcctatcctgctggcctaggatttaaacctagcttgtttcatgtatacactcacaacatgtaatgattgaaacaatattcacgctaaatcatttggatgataatttccagccgcccctatcctaataacaagcttatacggagttcttgcaactagacaatatagttgctcatttggctttaactcgagaacatgaacgatggtcatgtgtctgggagagtgtaagatatattttgtaccctcaattttttagcactacgcaaccttcctcacccttcattcggccgtggacaaataaatgtacttcaaaagtaaaggtacatttggatggctattgctcatggacagacttaagacaagatatatgttggaccataagaattgtgctccactagacaatgagttatcttgtgttctctgtaatcaagggggtgatagagacaatgatgcatctcttctttgaatgccccatttcatgttgggcctcagttgggatcatatgggacttgacaaaaaaaattgatatgatgatatgagggaagccaaaaaggcggtatcaagaggtgattgcttctggagaaacgtttgccaactgcgtgtaacatctggaagataagaaacagctacattttcgatgaaaagcctttttcttcttcttggaggtttattctcaagactggcctcattttacttctttttagacttaatgagtgagataaatatatagttaaagaccttcagattatttaaagatttaactacatctttaatttcagagtaagtttcctatgacagtagctattatggtcgaataagttacataaaactatgggtctatttggtgaggttaagattctgagaagcatttggttggtagccagtttctgagaatctaaaaggctgggtttctcagcttctggcttctagttcattttttatattctacaactaaagattatcagaatctgaactaaaagctagactgctagaaactcccccaaataagccctataagagttttggcacatgacacacaacccatgtattatggctataaagtttcacaaaaccatattattgatcattttaactttgatctaccatacttttaagttctacactcctatatgagatttgttttctttttattcacatataaatgctacatgtatgcaagtatattttaaaatttttgatataggagtacgtcaaattggttaatggtgtgattttgtgaaacttttaggccacaatatttgggtttatgtatcacatgtcacaatttatgtggttttgtataacttgaaccataatatgtgaggttttacgagatttactccttttaaatgaggttttaagacttaatgagatagtgaaatttagacctcggggcctcacctgttgtgctttgatatgtgaggttttatgagatttactccttttaatgaggttttaagacttaatgagatactccctccgttccaaaatataagcatttttagcatagtgacaagtcaaacatttttaactttaaccattaataaaaaaaataaaaaagatcaatcatataaagttgatgttattagatttatcattaaacaaactatcataagatacaactatttttatttaaaacgtcttacttttatagatattgttagtcaaagtagcataccggagaccgtgtgagggtccaaaaatgctactccctccatctacttttgatagtcatatttctaaatctgaaaaatttatttttgataggcatatttcaatccaacaacttatcatcttaatagttttcttatatttaatgcgtgactctccattcttccacacaagattggctacatgggcatcgagaaatgtaaatattaatgagtcgcttgtttacgaggaataactagtagcatatttaaatggatgataagtagaatcacttatccttggtttgtatgtcaagatgaaatatgactatcaaaagtagatggagtgagtaatattttggacggaggaagtagtaaaatttagaccgcggggcctcacctgttgtggtttgataaaaaaaattattcatgctaaatcaactaatatctggcacgtataaacctgaatcttttctatattgttacaaaacgaatttaaagttcgagtccgcgcgtttcgataatgtacatttgctcccccacggtagtactatatacgttgatagtgtgtaaagagcctctgtactcgctttagtgcgtactatatatacaggcgtatgttcggtacattctagaccaaacccaaattaagcctggcacaaccagttattaggcacaaaatgtgtagaaacaaatttaagcccaacataaactacacacctttcggtccatctcacctgactcgactgccactagttgtagcttggaataagttcaccggaggtccctcaacttaacagcgagatttctagatccctcaaccacaaaaccagaaatattcacccctaaactcactcaaaccatgcaaagcaagtaccaaggcagtatttgtgccctgtttttatgacatggcatcctagtaagaaaaaataaataaataaatatgtggggcccatatgtaagtgagagaaaatggtgtaggcccacaactctcctttcttgcctttctttttctcttctcttctctcgagcaggcacggcagtagactttgcgtgaggcggccggcggcgaagtaggtgcggcggcggtgggagaaggggagaccccaccaccaccacgcgagcggaagcgggggcgccggggcgggtgcggggggatgggaggggtgacgtcgagcgtggcagcgaagatgccttcttcccgccgacgccgccatcgtacgcgctggcagggtttcaaaaaccgccgggggcccggttaccgccacccggcggtacgacggttaccggcggtaaccgcggtaaccgcgcaaaaccgcgacaaatttacaaatcgaaatttgaattcaaaaattcgggcaaaccgcgcggtttggcgcggttaccgcgcggtttgacgcggtaaccacgcggtttggcgcggttaccgcgcgatgtgtaatgggttgcacagtaacgggccggcccattttttttttctttttccaattttcaaatttattctccgttttgctctcaaatttgaataaatattactcttttttgagaaatttcttcaccataaaacactataaatcaagcactaccttcactatttttttttgatttttttcttttttttttaaatttttgaatttggacgaattttattaaaccgtaccgcgcggtacgggtaaccgtacccccgcggtacgggcggtaaccgcggtaaccgcgcggttaccggcggtttttcacaccctgcgcgctggtggatgaccacccggcgggggtgaccaccatgacgggccaaccacacagggagaacatcgaggtgctccacctccggacgcggcggtggaacaccgtggtggcggtgtacgtccgccacctggacgccgccaccacgttgctctactcccacggcaacgctgctgacctcgggcacctctaccagctcttcctccatctctccttcaacctccgtgtcaacgtcctcaggtcagtcaactcactcatgctcgctcacttccttgcttgcttccttccctctcctgcttcatttgcttccttctcctcctgcgccgcgcggcgcgtgcgttggggggggggtgggcgtgatctgtgtggtggggtttgggcgccccagtacgtggcttctggtgctcctccatgactgcggctttctcgattcgttatgtccggatgggaaatttcatgttctactctgaaattttccctctttttagatcaagtgggtttacccgcaaacccgtttataggcaaaaatagtgcgtaacccgccagtttgactagcgggttaactatgaatttgacttataaataggtttatagatcgatccacttgtatatttagatgcagcaagttgggccgggacgcgaaaacccataaattattatttatttaaactcgtgggtcggcccgcttgcacccctattttgagcgctattcatgtcgtggtactcgataattttgctcttttagcctaggaaatcgatgactactccctgtttttttttttgagaaattttgattatgtctttcggaatatttatttccgtccccttaggtttgccgcaatattaagcaaaatcacgcaaattcggcatatactacatggtgtgatttgttaattgcgatggttcgcctggtcgtggtccgacgtcggcacgccggcgtcgctggaggacaagcacgtgctgcacgccatcacgatggaggacggccggtgttccccctctcttgccgctcctctcccccgctgccgcaccgcgcgccgctactctccgccgtcgagctcacaatcgcgccagccgtctctctccattttatctcacttacatgtatgccttagatatttatttttttattttttactgactaggatgtcacgtgagcaaaactggatgtaaatactgccataataccttctttgcacggtttaaatgagtttaggggtgaacgtttctgattttgtggctgaggaatctcagaaaatctctctgttaagttgagaaacgtccggtgaacttattccttgtagcttctactcggaactggcctagcccagccaaccaaaacctccaaccgatcaagcctgcggtcgccattgttagggctgaatatcaagcctgctggtgagctcggcccggcttattatggctttaattaagataaggaaaaagtacgccgaaggtccctcaacttgtcattcgtccctcaaccacacaaccagatatatcacatccctcaacttataaaaccgttcactttagttccctaggtggttttcaccctggttttgtctgacgtggcagccgagtcagcgtgagacccacgtgggccccatgtgacagggtgtccacgtcacccctctctctctctctctttcccctctctccttcctctctcatttttcgccttgatgtggatggcggcagcgtcttccacgcgacggggaagagggctggcgtggctggcggctggcaggggaggagcgctgcggagaggagggccgatgtgacgggcgccgccgccgatggctactgtcgcgcggatggccacggcggtcgtccccctcaaccgtcggcctcgacgcggcccagcaatccgctcccgtccacactcctctccgtgcgcacctccgcgccggggacgcgtcgttcgtggatgtcgtcgtcacgcaggcgcggccgcgcgggtgttcgacttccggtcgccgctcgtcgacctccttgccgtctccgccgcgcgcttctgatactctgctgagatgcggcgtacccgtgggtggtggcgatgagcgcggcggggtcggtccgtggtcgcgcacgcgccgcccatccgcctcacgcagcggggtagctgatggcgaacccgccgccgccgaacgccatgctgtacgagtgcatcacgtcctgctccacgctctctgacggcgccccgatgtagtacgtcttcgcgtggtcgaacttgttcaacacagccaccatgttgtccgggaagaacaccgtgtcgtcgtcacccatcacgaaccacccatcccagtgcatcgtatcacgtcgcacaaccatcggaagagcaccccggaacgaaatcatggcggcggcgacgacgacaaataagctccagacgatgcggtggagctacctcgacgaggacgacgactacggcgacggcggtgacctcagcaccctgctcccaccgcgcgtggtcatccggccggacgagaacaggatccgtcgagtaccgcttcaacgaggatgggaaagcggtgaaggtgaccaccaccacccgcgtccgtgaggtcgcgcgcacgcgcgtcaccaagtgcgccgtcgagcgccgccgctaggccaagttcagcgccaccgcgcacaacgacgacgccagcgagccagggccccaccggttgctcgtcgagccagacatggccgcgcatctccccatggcaccaccacagctccacgtacccgcgccgcttgtccccggcgcggaggtgcatggagaggagtgtggacgggagcagattgctgggccgcgtcgaggccgacggttgagggggacgaccgccgcggccatccgcgcgacagcaggcatcggtggcgccgcccgtcacatcggccctcctctccgcagcgctcctcccctgccagccgccggccacgccggccttcctccctgtcgcgtcgaagacgcagcgccatccacatccaggcgaaaaatgagagaggaaggagagtagaggggaaagagagagagaggggtgacatggacaccctgtcacgtgggtcttacgctgactcagctgccacattagataaaaccgggaagaaaaccacctagggaactaggttttgtaagttgaaggatgtgatatatctggttttgcggttgggaacgattttgtaactcgatgacaagtcgagggacctttggcgtactttttcctacaactcgtccaagccggccattgatcggagccatgcagcccatgtcgccgtggcccactttcatcggtcatcgactgccgatcgaaaagcccccccagaagtagagaaacaccggcccagacggtatggagaagcgcggctacgtgtcgtcgcctccgtagtgcggcggcggcgcacgcgttccctccggtcgcctcgctgcgctgagctgagctgacgcccgcgtggagctcgtactagtcctcgtgcttggccgccacggagacggagagaggcctccgcccttcccacgtcccgctcgtcgatccgatccaatcaaacgtgcacgtcaaacatgcacacgtcccacggccggagaagagcagcatggcttggcgtgcgtgacgctactccttttcccgccgcgtttgcttatggcaccaaccaacacacgcgtgggtgggacggtagattagtattgtcccccccaccacaggcgatttactacactttcctatacccaaggttgctaggaccaggatagtatcgtctcgctcaaagtaatatcgtattgtaagattgtattgtagtttcaggatactatgagattttctttttttaagtttaattaatatttatattaattatatatatagccattctatataaaaaaatatagtaatgatatatgtaatgcaaatagagacatttatcaagagaaaccatgttggttttgatatatttaactgatttttataaaaatttgagcatatttatttatattattttcaaaccatgttattttaaataatattttgtagtatcgtagggatcgtagaatcgggatagcacctaagatttcgtaggatcatgtagtaatgagtagtaggatcgagatactatgaaaattaggatactagatgggattggtatcgtttcggcttggtaggatcgtagtatcgtaagatactaggatatgtatcgggatactgacaaccttgtttgtacccttttgatcgtatagagaattttcactacgccggaccaggtcatctctgacgggcccaaaccctcacctttgacgggtttggtcttggtcagtgattagtggtcactgatgacaaaatcacctgtgacggatgaaacacccgtcacagataacccatctctgaccggtatataagtcatctctgacgggttaaaacttgtcacccgtcacagatgagtcatcagtgacgtgtcgtaactacctgaccgtcactgatgactcatctctgacgggttgtaacttacgacccgtcactgatgacaaagcaagaaatacaatttttgaattttaaacgcaacaaaaaacctcaaaaaaatattttgaattttactagccattctatacatggttacacatcactacctacaaattcacaatttttcacgcaatataacttgtatgctacaagtgagattcgaactcaagacctcaacctccatatagagctcccttaccaactcacctactcaacacatattgactactaacctaatgttattattttgtctatgcttatctgaatcatttaacatatatttaacaccctaaatgacttcaaatgaaaatattatcaactaaatagttatagatctcatcgtgttttataacttttacatagaaaatatcttcatccgatgttgtttgaagaattcaaaatttcatttttcaaaatatatctcactttataacatgtaaattttgtgaaatgaaaatattttcaattataatgttgtagatcttattgagttctatgactttgatacggggcatgtatccatccatgtcatttgaaaaaaaactcaaaattttgtttttaaaagtagatctgatcacttgtaatgcatgttcggggatgtaaacgatctctaatagaaatgttgttagttataaagttgtggatatcattgagagctacaacttttatataggacatgtttcaatccgaggttttttgcaaaatttaaaaatttgaattttcacctgtgatatccgaaaggaaaacccgtcagaggtataccagtgacgagttttcctttcggcccgtcacaggtgaggggatacctgtgacggtccgcggccggatggctcaccggtgacgttatcccgtctgacccgtcagaggtaatggtcactagtgaccaaatcgtttgcccgtcacaggtatcccgtcagaggtgtgaggatctggcgtagtgtttcacgatgtcacatgtgcgttgactcagattattctacaaacacgattgttattattttctttatgttgctctagaaatttatataaatttatactgattattatagcattttccaaccgaattgcggttacattatcccactttcatgattaactagcgtatacagtcatacgttcgcacgactttaacctctttatgtactaaacgtgtttacatttacacgttgtttgtactgataaattatacttagtctatagctatacttatcggcgacagtggatccgtggtttataaatatgagaagtgggtttatttgtatgttttttaaagaatttatatgcagaatagagttttagaattgttgtagcggacagggttgggttttgtatttgtcttctatgctgccatttctccctccctaatcatctttttagcttttgctttagcagtttagccgcctcattgccaccgatcatcgtttgcatttttgtatgaccctaccattctcatattatttttatgtacttaataggtgttcggaaaacttatttgaccaaaaatctatacatacaatacaaatatatctatcttgtatgtaataaataaatgttatcatgaaaataaatactaattttattactcccttcgttgctaaatattataggtctacgtttgagcatagcatcataatagtaagttaagatgttttttttttcttttattgttttgaaatattgttgtccgatttgaagtagtaaaatggattgccatgtttactcaccaataatgttagaaaaacacccattaattgcactatcaaatgtttcgtcgagcatgcatgcgtcttattgatattttattgtcattggagattttacctttaagcatcatgatggttactaatagtatagtaaacaactattgtatgaattggctattagattggctatagataaattggagttaatagtgggctatgttttagatcttatgtttttaccatatattaattaagagcaactattaaacttgctcttagagctatgttttcgatctttgggcttgaattattatatttatttatgatcggccaagccagcccatccagccataatcgttgcctgatgtgcactgtctctctccccctgcaagaaagaaggctagaaagctctagatagcgtttcattggtttttttactaatccaatccaacggccgctttcaccctccttttctctatctgatggtctagaatttttattttatgtggatcaataagatgatgttttgagattctcttttcacttggaaagattcccagattgttttatattttgtcataccgcaataatattatcgtttttggcaggtaccaccacagtatctaaaagctattggaccctccaaaatgcatcttttgttgacgaaaacagtttttctcttcacgctgttcacttctcgttgatctgcccttcccagtccccagagccggtggtcagctccccggcgagacgatgcgcgcggcacaagcagccggccgatccggatccatggcgaagcggtggacagtggacacagcccaagaccgcggaggccggagcccactaccggtcacacgtccctagctgggcaagcgtgcatatggcctgatcgatatatgatagatcgtacgatcgatctactattctgcctctcggtgccctgttcgcgactgattaaaaaaaatgagagttaaggaaaaaattatcaacgtgtaaaaatattataaattttaaaatattataaaaaaagtaattatcaacgtataaaaataatcaagttttaaatattatcaattttaaaaatagatttaattaatattttaaagtaatttctacgtagaaagttctagtgcggtttgaaaaacatgttaacagaagtcgaattatagtaagaaaagaacgggggcactacagcatccaacacatctgcttggtcaagagtacgagactagtatggaccgtccgtgcgtgccgtgtgttgtccaaaatactactttcttcgtcttaaagaaaacataacttccatttatgtatctgagtataggcagtagttttattatttttttttttacaaaagaagtagtaacaaagagagcatccatcaccgtccatctccatcccatcgtcgtcagtcgtcagccgcatgcgtctaaaaccttcccaggtagcccaacaaaacgtgggttttgctactgctacgtgtcaccgatttttgggctgtacacgtggggagagtacgtacaaccgcggtctcgtcgttctcgttggtgacccgtctaaaagcgaaagccgcaatttttcttagatagtagtaataaaaatggtatggagagtcacacagaaaaacttgtcatcgttacgtgcttctaggtacgttgacgtatccggttttgtaattgcgtcctcacgattagtcggtattaagcttgattataaaaaaatggctacctacttacactggatgatattttaatttgtctgaattatgcatcgaatatttggctggtatatgtatctaccaaacgttcatatagttacctattttcatataaagctagatatctttactctttttttttattattttggatcaccccttctccatctctcttctcctcctcgaccatggtgatcatggcttgatcactagtgccagcagcggcaacaaatgtcacgggacagatcgtggagtcgcctgtaggcaccagcacgacccttttgggctagccgtgatggcctgtgcagcagcgtcgagcgtgttgttatcatgcagctcaatgacctcggtcgccaccaacttaattgtggaagaacatggcggcttgggtgcagtgggaaaccggaagagaagagagaaattgaaaaattgatatggggtggtcctcagtaaaaaaagtaaaaagttcgaattacccctaaactattatagactgttgtagcaacaagaattactcgatcaattaaaaaccagacattcttcacccttaactttttataaggttgaaatatttcgctactggtctcctgagcgattttggcccacgtacacgtggccgttcatgtagcataaaaatataaggtagggcccatatgtagtgacgagagaagaggtagaactgacaattgagtcttagcattttttattttatatgctaactagaatgtcacatgtgtatcatgtagaactaaaaccgttccagagtgggtcaggggataattcgttcgatatgaaaagttgaagatgaaaaatttctggtttttaaattaagagggataatttatactgccataatagtttaggggaaattcggacttttttattttaggggaggtttggggcgtttaactaaaagttattaatattgtttcttggagctagatatttattaactttacgaggaagggaattcgcaacagcaccatgaataaggtggttgtggcgtgaatggagattggcagataagacatgggcgggcatgaaaatgacatgggacgacactgatctgacaaacctctcttcacggcaactacgaacattaaggttggcgatgtggattaagggtgtgttcggcagtgaaagctgtttcgtgtaaaatttatcaaaaatttaaattattttttaaatttatttgaatttaaggaggttacagcggtttttctattaccctacccctgcggtaaggccggtatacggacggtaatgtaaaccatgtttggcacccctagttcccaacccctttcgttcattttccgcgcgcacgcttttcaaactgctaaatggtatgttttttaaaaagtctctatacaaaagttgcttaaaaaatcaaattaatctatttttttaaaaaatagctaatacttaattaatcatgcgctaatggatcgctctattttccgtacacactatttatgttgggagcaaggggtgccaaacacactctaagacaagaatttgggacttggcgtggctgcatggatatttctatatttgaccattaatctctatatattcgtacagtttgttttagatttataatttatatttatcataagaaatatatttctattatataagagtaaattttacaaaactataggtattttgcacaatttatcacgaaactacaagtttaagagtttatttcacaaaactacagatttagtgtctccgtttatcacaaaactagatgtactttgtacaatctatcataatattatagatttaagaacttgtttcacagaactatagattcagtgtatttatttatcacagaactacacatatagtgtcttcattgctaaaacctgtagtagttttgtgatgatggagatattaaatctgtagttttgtgaaacaagttcttaaatatgtagttttgtgatatattatgccaagtacatgtagttttgtaataaacgaagacactaaatctgtggttttgtgaaacaaattcttaaatatgtagttttgtgataaatcgtgtaaagtatatgtagtttatgaaatttactctaatttatttgtaattaaattgtactgatttcgaaaaattaatggttaggccaaactaaaatgataagtaatttaaatgggggcattactagatccgatggtatgttgtttgaagttgtattaaatatttggctggcattactaggtttatagagtttaatgtaattgctgcaattgtttatattaaaggatggcgtgctactagatactccgtagtaggttttttttttttgaccgggtactccgtagtaggtattctgcactttactatctttgtggagatttaatttgtggggtttaggtttcttggagacaaatattaattaactttatgaagaagttaactaatgttcatcaagttaatgcttagctcgaaagggaactgtcacgtgtagcataagctcactgtagctacaactacaagatagtcgtactagcttccagtaatatagtacactagtagtacatgttgctggtacaactcctgagccaaaacaagccaagtaattaggctgtgtttagttgacgtcaaaattggaagtttgtgtgtaggaaagttttgatgtgatggaaaagttggaagtttgaaaaaaaaaactttagatctaaagacagccttaatccccttgccgtattgcagcagccaagtattttttttacggagggagtatatctacaatgtataaactttcagggcctctaaatcgaaggattgagaaaagggaggaatatgaaaaacataattttttttgataggaattctataaaaattagaggattgtaaaacgtagaaaaaatatatgaatgatcatttaattgaaccatcggaaaatcgtaggaattagataagagagataggcttataataaactttccatgagtttggacctcatgttaaaattctccaaaactcgtatggattgagacatttcttagaaattttacagtatttaatagttttcaatcctttgtttcaaagggtcatgtaggaaaaagttttataggattagaatcctataaaatttctataatttcccttcaaaacaaatggacccttactatcatacgtacttcacttgtgtagctagaggaagggcatgtttgactctccagctcctatagctccacttctattggagctggagctcagtcaaacattttcagctccacctaaaataagagtatagccggataaagcgctctcacaaaataaactaaagaggtggagctatgttaggctatttcacaacatcaccccaaatccaaattctggagttaaattttaaagttggagctctaccaaacgggtccgaaagcaatgttggagtagaagtcaatgttgattcgtaatagcggaagctcacatcactctcgccattgccgtatgcagattcctgggttctggggcagccagactaaggttttgtgtttgctccagaattaaggccctgtttagttggcaaaaaaaaatttagccttggcgtgtcacatcggatatatggacatacatttgaagtattaaacatagtctaataacaaaacaaattacagatttcacacgtaaactgcgagacgaatttattaagcttaattaatccatcattaggaaatatttactatagcgccacattgtcaaatcatgacgcaattaggcttaaaagatttgtctcacaatttacacgcaatatgtataattggttttttttctacatttaatactccgtgcatgtgtcaaacatttgatgtgacagtataaaagttttcgcatgaaaactaaacagggccttaggctttaagagtatgtgatgattaaccaagctccttggaacatattcctcccagccatccccatgacaaagaatattctgtccaccaataattctataaaagtctcgtatgcatggtagctaaaaaggaaaccaaacaattaactgccccatcagttctaaaatataacaacttcttcaattaattttttatccaaaatatagcaacctagtaaatgtaatagttgatttttaacatcttttcttaatacttgtgccgaatgctaaaaattgatagattttaagatgggaggagtatctagtttgtgcagcaaacacccatcaacaatcaaacataattttacatccttaagtatcaaaaactggtaagaagaaaaaaaaaccctagtgcaatacaacctcacttatactaagtggttttcatgatttgacatccaaatatacgtgttttacttgcatttaactactcatcaattgtaaaaagaacaccttttgaatttcagaatcataaaaagcacgatatgaaacaagtttgtattctatattatattatctacttgtattagaatgtatataaacgcattagtgatttatatgcttcattttatagctatataaataatgtgaaaacttagttagaaccacatgctacataggatcctgccctcaaatatcctcgagtattcacatcattccatatgattgtcaagggacgtaaaatatctagttttatagttgataaatttttttaataaatagagaggtgtaatagggatttatcccacacgaagaaatacaaaagtggtcctgcaaagcgctcttttaaatgaagggtgttttttacttcacgccaaaattgaaagtttgattgaaattagaacaatgtgacgaaaaagttggaattttggccgtgtttagttcccccaaattcccaactttccattccatcacatcatatcgaaaactttcctacacacataaactaccaattttttctccaaactaccaactttctcctaacttcccaacttttccaccatctaaacacaacctttatatgtgtaggaaagttttgatgtgatgaaaatgttaaaagttttaaaaaaaaagttaggaactaaagcaggacgaaagcaaacggaaccgaatacttctatccgcacaatgcagcttttgatcctttcagaaaaaaaatgcgtgttccttttgacatgtttggtaccggccagtgacagcttcttctagacggcgtttcagcacaggaagcttttgagaaaattaaaaaaaaattagagaaggctgaacaattggagaagggcaagaggccagtggcatatttatttgtttggagggaaaaaaaaggaaaggaaaagtacatgaacaaatgaaatgtcttcagaaacaaaaacaatgaacaactgaaatgatcaactgggctgtttgcctgttggtaggttatggcgtttggtgtgagacgctgatggctaacaacgtcaaaccccaaatggaccgatgaaacagtagtgaacaaggttccccactcgcgtcttctgttgaaaacgatgttcttctctgttgtagctgcacttttttttttaccctatgtgagtgactggaaatattgcatgagaagattccaaatattggttttgtgtggaattacaggggtgtatctgcaggctgcgatattttactggaaaaaaatatctaaagccattttttttgatatttcgaaccatttaattgactgaaacaaaatgtacatttagtcatatgctctctactaaacgtgcattaggatgctagggatgttctttttttaaacggtgggagtaaaatgtatatataggttgactttaactgattgaccttaaacatagagttgccataggctgtgttcggcattccctcttcccaacccctctccctcgttttccacgcacacgcttttaaaacggctaaacggtgcattttttaaaaaaagtttctatacgagagttgcttaaaaaatcaaattaattaattttttaaaaaatagctaatacttaattaatcacgcgctaatggaacgctccgtttttcgtacagacggttctagctgggaaccaggaatagcgaacacatccatagtctctaaatctccacgtagccctttctgaataaaataaagaccacaaaacgatcatcaaattttacgcttgttatctacttgtattagaatggatatagatgcattagtgatttatatgcttcattttatagctatataaataatgtgaaaacttagttagaaccacatactacataggatcctgcccccaaatatcctcgagtacattggaaacctaccaccaccactggcaattaacaattcctctattcaccactaaccaattgctaaccgagtgccaaaatccaccccaagaccttcttcagtgcaacagataatcatagaagagagagaagaaagataaggattagcagtaacactagaataaatttaagcatcagggcctaaaaaatgcaccatgaaaagagagaaaaggtgggaaagaaagcaagcacaaaaagaaaataaatatagattgagtaacaaacaagccaaagctaaagtctttcttctctctcctatgcctacccccttgctaatcccctctctctccttatttgtgtgccttccaagtgcaaccctaacaagtctcctacttaaaaaaagaaaaaaatatatcgttttgctaatttacttttgtcattcttatttttgggattgctaaattctcctcctctaggagtacactagtacagtacttggatatcccaaaaacttttttttatatttatttgtagttggatatcccaaaaactatttttttaatatatatttatttaaggcaggggaggggaggagaaaaggaaaagagggagaagtaattaagcaacagtgaggccggagctatctatctatccatctatctatcatctactatccttcctctctttcctcctcctcctcgcgcagccgcgctcagatccaaagccgcgcgcgggggagggagggaggaatcgcggtgccaagaaacgaagccctagccccccctagatgcgcgccgccgcttgctgctgctgctgctgctagggttcttgtacggagatgcggggcgtcgagtcggatggcggcggcggcgcgcctttctcctcctcctcctccgcggccgctccaggtgaggcttttttttttcttgaggcttcttgatctggtagctgctgctgctgcgagtagtttggggtgctgtgttggcgttgaatttggtttgcgggaaaagtcggcgccttgatctgttttgctgtctcttcccgatgcgaatcgttgggttatcgacggagaattgctcgaattccaactaggaaaggatgtctgttggttttctttttttgttggcttgattggtgtttcgtgatgttcttgctgttgttctttgttctcggttgtaattttgggggtaaaagatgtgggtttttactgcgtacgattagtatgatctgcgccatctgacgcttttttctcgatgcagataatttcgatgccgcgcagtactccttcttcgggaaggagccactggaggggctcgagctcagttgcttggaggatggcggcggcggcggtggtgatgccaatggcggtggattcagtggaggagcagaagaagggctgtaccggctctcctctgttggagaagaggtgcgaggattcaggagccttcatgcccatagattgccgtctttgttgtgaactatcgtcgtgctattcgtttgtgttcttgggttcacatgcatgctttagctctttttctcgataacacagtcctttcggcatggcggcaagcgatagtggaggcttagtgctaggaggaatcaagaataaatgtccatgtgggcctctagggtcttactagtggagctgaggttcacatcagtagtgtccgggaagtggctatgttggaatgtttttgtgcttcaattataggcagatcgatgtgtgttgaatgacggtgtttatcagttgtttgatagctaaaaggttccattgcaacggtagaatttcatgagacacggatggaagacgaatctttgctgcgaccatcctgttgctacatgtagagttgagaatcactagaacagtgcatgcttcttttgataattgatagtgactatgaatgtttcatcaggatatgacagtgaaatcgataatgttcaaggtagccttttggctgcttcgtcaaaagcctattctttgcttgtttaagtccaattataattccttttgatagttcatcaagctatagctgtatagcttctggctatggaatctttggtttggttagttttctagcacacttttccttgtgttgcttggcccaatgctcatttgctctggaactcaaagagaactattactgcattttgggatcaatagcataattgggcaaaaaccatataatctagttcgttacaaaatgctgcactgcttcaactgttggctgtattgccatttcttaaatgcttgagttgctctcgcattctctgctgcattgttgatagattgcattgccaatgattactatttagcagacttaaaattttcttgaggatcaaatgatggtttttattgtccatgtcatgtcatgtaagcctaagcttacaggttaacacttctagctttgagcaattgcaatttataacttttatatttttgttggttggattaaaaggtttttggggggttgaattgaaatagttaatgtgcttgtctaaatagccaattggagtttattgtgatgggcaaaatttatgtttaatattacattgcaattggccatcaatctttgaactgctcaggctctacaaggagttatggatgcatgcatgtttgagcaccctgcattctatacatgcccttttttttttaattttgtagcactttcaatttctacttccctccttagattatagatttactatcattttcagtgttgtggagttattctgattcaatttactatgttctgcagattgataatctgagtaacttgtccgatattgatgatcttgcgagcacttttgcaaaggtttgtttcacaagctccactgttttaaattgaggttccattattaaaaaaaaatgcttttgcagtaacccttggaagtattagatatgttaaggatacttatgctttaccattgttggctaagtggttactctaattcttccgtaatccattctcgtatcaagaaatgttttccccagaaaggttgcatcttcaggctgcatgtcactaatccccccaccttccaccccacaaggctaagctaacttaaacatcaagtgcacattttattcatttgtagttgtagctatctgcctatttccactacaactagtcctgcctgctgccaagcatgtacgggataaatgacacatggttagtcaagtcctttggctgaatctagcttcttctggcattgcaataatctgttttgcaatctgcaagtattttgccgcatctaaggcccaattgtacatagaagatctagatacatctgtaatgtctgaagttgttttggattgattagcttggctgttgttctttttctaaggatattttatatcatattgcttagttgaagcccatgcaaccaatggattaggaattcaggataatcactaatgaggcctcaacttttatctatacctgacaaattgcttgcatatggaaccgtaacttcataatattttgttctagccttaaaaacttatgtttttgttgtatgcgttcgttctgctgtcgcacactgatttatttatatcttttaatgtcagttgaaccgaaccattagtggaacacggaatcctggtgttattggtgacagacgatccatctcaagaggaagtaagtcaatctttgtgtcccaatacaaaactagtcgtgatgagtgttatggagtttgttttgtgtatatccttataaaatgtgatgcccaatctttgtttttaaaagattgttgactaaaaatgttaacatatgcataatcttttgtgcatgtagttccttttttaaatatgttgaagtcggccattttgcgtttcactgctaattgctggtataattttgacttgctatacacagttgtggatttgtatcactcatgtcaatagactattgtaaaaaaaaaaagagaagagaattgtacaaaactattttcaccaagagaaatatggcagcttttgtatgcatctttgttgaaagctatatataatctcacttatgaaatgcttccattctgcattactgcacatgtttccaaaactttaatgccatcaatatcgaccagaagaaggctattttgtgtctattacacccttttgttgaaaaacaactattcttttggaactctgggatgtagccaaagtcaaattaatgcctgaaggctcaacttgttactgaactatgtaaatgcccttttcaggttctctaactgttgattgggctgaagatgtagaatttcctaactgggtagatcaagacattttagaggatgaggaatttcaggaaagtaaaagatggtggtcacagtcacacactctggtgcagcaaggggatgccaaaccattgagccgaacatcttcctatcctcagcaaccactgcagcaccgggcaagtgaacctatcattccaccaaaatctccttcatttacgtcctttccaccgccaggtggtagatcaccttatacttctcaaggccttacacgccatgggagcattccatcacttggtgctggcctgcaaatgggttctccaagcatgtcccttccaagttctccatatcatatagctggactatctcatggactaccgtatggagggagcatgtccttcggcacttcaaatctgcctgtaaacaatccaatgcaaaatgattggccaagccaagccaatctttatgctggggagcaatttaatctactgccgaacatgttacagaaacaaatatcacttccaaatagcccgatgtcatcactgttattttctcaacagcagcagagattggcacaagttcaagtccaaccatcccatcagaattacctaaatttaccacctcacatattttaccaacatcactccccagaattaacaggaagatttgattctgttagcagtgttccttcatcaagagacaagagatcaaggtcaggaagaggaaaacacaacatacgtttttctcaaccattgcctgatactggtaatcaaaatggtgatagtggaggaataaaattcagatctaagtacatgtcatctgaagagatcgaatctatcttaagaatgcaacattcagcaagtcacagcagtgatccttatgtggttgattattaccaccaagcttgcatcgcgaaaaggggtgccaattctaggccaaaggccaattttgccccaacgtcaatgaaagacttgccttccaagtcccgatccagtggtgaccatcatgcatatcttcaggttgatgctgtaggaagagtttccttctcttccatacgtaggcctcgttctcttcttgaagttgaccttccttcatcaagtgatggttctcatgatcagaagtcttctctgagaccattggagaaagaaccaatgctggccgctagagtcactgttgaagatgccctctgccttcttcttgaggtggatgatattgaccgtctgttgcagtctagtcaggcacaggataacagtttccaactgaggcgaagacggcaggtcctccttgaaggtttagctgcatcacttcagcttgttgaccctctcgggccgagcacatcaagccattcatctggattggctgctaaggatgatcttgtttttcttcgcattgtttctcttcctaaaggacgcaagtttttgtcacgttaccttcgacttcttacccctggaagtgagttgacccgtatagtatgcatggctatttttcgacatctgaggtacttgttcgggggtttaccatcagattctagtgcagcagaaacaacagttactcttgcaaagactctttcatcttgtgtgcgccatatggaactaggtgctcttagtgcttgccttgctgctgtggtctgttcacctgagcagccacctctgcgtcctctagctagctctgctggtgatggggcttctcttattattaaatcagtactggatcgagcaactgagttactgactgaccagcatgccgcagccagctatacagtgtcaaaccggactctctggcaggcatcatttgatgctttctttggacttctgacaaaatactgtctcagcaagtatgaaagtattaggcagatgtttaccatgcagtcaccaggctctgtaattggatctgaggtctccaaagcaaccagcagggagatgccggttgagttgctacgtgcaagcctccctcatacaaatgatcagcaacgccagctgctgcttgattttgctcagcgaaccatgccagtgactggttttaatgccagcggtgcaaatggtgggcacatcacctccgagtctgttcctggttgatttagctcaagatgccaaaaagtgtagattgtcaatgcttaaaggacttaaatgtgcttgtctttggatgataattcttttatatctggagacatgcataaccccttcataaggtaaggttgtgtgagcttggagaaagttccatttgctcaggaaaaaatagccttcagattgtgactttaggcttcagattaatctcatagaccaacaatctcctttctgtgggtcatttatatagcacccacctgatatgcatatgtacatgcactgttgtaacactatgcagggatgaactagccgtctcgttggggcgaattttagcttttaacataacattcatatgctcccagtgaagaagacatccaagactagtgggtttagcagcagtggttgtacaggctctggtactttgaggccttcctgtctgtctttttactagtgtggaaggttcctagcgtcaagtgcgtagtagtctggtcttatcatgttttaattaggatcaaaagtgtgttggggataatgaagtggtgatgtttgttaggtttctggaaagatatttaaaatgtcatggagatggccagtgtttccaggtacctactgacactatagtgaggatactggaaactggggctatattatctcttatttatacatggttacaatttgttgtcattttatttcttgcctccaggttactctttgctcaaaaacatttttttagggggaaactctggttgcatcatatactttttaccaggattaaggctgcctgcctttgttgtaagtttgtgtacagtagttattagttgcagccttaaactggatcatttgaatgaagtagttgcagttaacctcgtgtgatggttagatgtatcagtaattctgcatgaaaccctgagcaaatgttagcctcttctggattggacgaattcatggaaattttatggaaattaagctgtacattatgcgattcttgcattcggaagaagccaatatcaatgtgtgacaacagttctcggtttatgaagttatgttatttacacggtaacatcgttgagtcttaacaatccataccagcaaaaaaaaaaaagtgccccctcccccaatcaattttctactattccatacgttccaaaactccaaaatatagttgcttctggcatcattagtatactacaaccatattttagcaattgagatctcctgcagtactgcagataacctgcatctaaattacttaactacaaccatccataatttaatttcttcacatatttttctcaactaataaaaatatctcttatttaattttcttacctactttcttatcttaaccgtgagtcacctaatcatttaattttaccttgtctttaatcaccatgaaaaactcaagttcctatattttggatagagagagcatttgttactttgacaggtcccccctacagccaaatgaccacaccagcttgctttccttgctttccttttctttgtctagcgacaggttttcatcaaaatatgtgtaatcattttcttttcttgttttgattttcgagaaggcacaaactagatccaccgaaattaaggcgatggatgaaacgaacagttccaaatgttgagggatgaaaatcaaacagttcaacagttgagggacaaaaattgtttaaggataatatggacttctattcgaattgagatgcccatgggatggtggcacaaacttttgctttcaccaagtagtgtacgtatcttgtgggctgctgtgcagatcgaagcctagcagtaacaaggttgtgcatgaggtatttgggctgatcccatagaaaacaagagccttgactccagtccaatgttccattttgcaccgagttgtgctggattggcaccgagacttattatactccgaaacttatttttccacctaactacccttctcaaaaatacaaatttctcctatttaagttttaatattttcttaatacccatatctaagtccgaaacttcaaatatactgagacgagaacagtagttgtttgatcgttttcacgtttacaaatcatgatttttcctaaggagcggatggggacgattctggccggagtctgaaaacccgatgaaacagcacagtacggtgcgaggctctgagcgaggaggtgagcttcttagcggatgcaaaagattattttgcagtactgctaatacagtaaaaatggttgacatataggtccaaactcatatgttaatatttgctactgcatcggcagtactataaacaatccccactaatttttgttaccttgcgctgttgcacacgccacccctcctcctctccattaaatacttcagatacacgcaacacacacaggaaggcacaccggatatccttcctccaatgatccttatcctgttgtccttcctttgaggtggagcacagcaacagcattattgatcccgtaattgattacgtcctggattctgtatgctcatcatcctactactgagcaggtataatagcacactataagccagctataaatatattttaaatagataaaagaatagagaagaacagcgggctaaagatatatagccagctacagcacgaacttcaagatgtaatatgtgtatgacaggtgggaccagatattaatagtatagtaagcaactacttgtatgaattaactattacattgactatagatgatttggagctagtagttggcgaaattcctgacgagcgttcagtcgctgccagcgatcgtttttttcttttttttttcttttcttcttttagtaagtttatacccctaaagtttacacatctaaagtttatctacctaaagtttgtaaaacgaatgttataagtcaaaagtttatatacccgatttaaattcaaattcgaattcaaatattttatatttttcctcttttagtaagtttatacacctaaagtttatacatctaaagtttatccacctaaagtttgtagagtgaatgtttaggggctatttagttcacgaacgaaaatgtttggcgtgtcacattggatatacggacacacattttaagtattaaacgtagactaataacaaaacaaattacagattccgcctggaaactgcgagacaaatttattaaccttaattaatccgtcattagcaaatgtttacgatagcactacattgtcaaatcatggcgcaattaggcttaaaagattcgcctcgtaatttacacgtaatctgtgtaattagttttttttatctatatttaatattccatgcatgtgtctaaggtggtgtttgaatctcctgaagatgaagataaatattaaatgtttcacgcaaaacgaggtggtaataacatgtgactaatttggttttaattattacaaacttgaaaaatggattaatttgatattttagaacaactttcatataaaaaatttttacacgaaacgtatcgtttagcactttgaaaagcgtgccacgacggcgccggctatccgccatcgtccgcgaggcccgcgccgcccgccgccccctgctgctgcggcggctcgccgtggcgcaccggctcggggcggtccccgcgggggaggcgagcgtgttcgtggcggcgtccgcggtgcaccgcgccgacgcgatggaggcgtgccgctacgtcatcgacgagtcaaggcgtccgtgcccatctggaagaaggaggtgtacgacgacggtgaggtctggaaggagaaccgcgagctcctcaaccgcaccaccaccgacggcgctgccgcggcgccggcgaggggcgcgcttgctgcggcagcaaggtgagagtcaacgagagctgatgcccaacctcccccaaaatactgtagattgtcaatgcttaaatgtgcttgtctgcggatggtaattcttttatatcttggagacatgcataaccccttcaatagagcaagtttaatagcccactactagtttcaattcatctatagccgatctaatagccaattcatacaatagttgcttactatactattaatatatggtcccacctgtcatacacacattgtgttttaaagtccatgctgcaggtggctatagatctgtagtccgctactcttctctcttattttttatctcattaaaatatgtttatagctggctaatagtcggttattataccgctctaaggttgtcgtgagcttggagaaagttccatttgctcaggaaaaattagccttcttcagaatgtgactttaggcttcagattaatctcatagaccaacaatctcctttcggtgggtcatttatatagcacccacctgatatgcatatgtacatgcactgttgtaacactatgttggggcgaattttagcttttaacataacattcatatgctcccggtgaagaagacatccaagactagtgggtttagcagcagtggttgtacaggttctggtactttgaggttactataaatgttggcttattctttgctcaaaaacaattttttaggggggaactctggttgcatcatatactttttaccaggataaaggctgcctgcctttgttgtaagtttgtgtacagtagttattagttgcagccttaaactggatcatttgaatgaagtagttgcagttaacctcgagtgatcatttgaatggaggaattcgtgggatttttatggaaattaagctatatcatgtgattcttgcattcgaaagaagccaatatcaattttcatggcagcattttgaattttgagtcttaacagtctataacagcgatcccatttgcaatgcaaatgactactcctatttgattttcagtaggatgaaagtgggccccgtcaattctctactagatccattccaaaatatagttgcatggcatgttgaaaaccaatcgtctggacaagcaaaacggtgtggtttattagtggcaagcaaaatgaagtactcattagcacgtgattaattaaatattagctcgaaaattttaaaaatatctactaatacactttttaaagaaacttttatttaaaaaacatcgtttaatagatcaagagatgtacacatgaaaaatgagatagtgaaagttgagaaaaagatatagaatggaaccttacttcacctacaaccatccgtaatttaatttctccatctattcctcaactaattataacatctcttatttaattttcttacctactattttatcttaattgattagtcacctaatcatttaattttaccttatctttaatctccatgaaagactcaagtttttatcttttttaatggagtcaaggagagagtatttgttactttgaccggttctcctacagccaaatgaccacaccagcttactttccttttctttgtttagcgaaagatttgcatcgaaatatgtgtaatccttttcttattttgattttccagaaggcccaaatactagatccaccaaatttaagacgatggataaaaaataaacgattttaaaagttaggggataccaatcaaacagttctacagttgagggacggaatggttttgagaccataagagcatcctcaccaaatactccatcccatcatcctgaaaatggcatattggaaatgaaagtcagtctccaacagatactccatccgggcaaccaaaaatagcttgggtgttatccgagcagaaacctcacgccataccccaagtgtcgagctcccaatcaaactcacgccaccatccggactgcataccatgaggggagtaacagtagagaggagctgcataccggatttggtggtggaaatttgccagagtgaagacagagaagcgctggatctggtagagagatcgctggagcaccccgccgctcgtgccatgccactgcctgcgctatccgaagcttctctgcccacaactcctgtcgtccccgctacccacactcgcatcgccatcccagccgctcgcatctctccgcttgtgccacccatcatccacttgcacctttggccgtgttgtccgctgtctgccattagccctcctccttcgtccttccactcatccttcccctcttctgtcactctcctggctattggcaggtacagaggagagagggagagaaatatgcttggatagagttagtattagggtgagttcgctggttctggttcccatcagcacagtaagcacggaaaacggagcgatccattagtgcatgattaatcaagtattagctagattttttttaaaatggattaatttgatttttttcaagcaactttcgtatagaaactttttacaaaaaaacacaccgtttagcagttcgaaaagagtgtgagcggaaaacgagaggagaggagttgggaaaagggatatccgaacacacccttagttgtcttagaatacaataaatttggatttttcagctaggtttacaaatatggttataaaaaataatacaaatatatggatggtcagaagatattaacaacatatagaaaattgtgatatgaaggtatatggatgatctgttggagtgaagaggaatatgcagagagaatcgttttctataataatccatatagggatatgaagatttaaatttggatgagctgctggatgctgtaagagagacaacatagactcctttcgaattgagttgcccatgggatggtggcacaaactttgctttcaccctgtagtgtatctcgtgggctgcagtgtagatcgaagccagatccaccgaaaacaaagcccagcagtaacaaggctgtgcatcaagtttttgggctgataccataggaaacaagagccttctacactgaatttttttcatttttaaatttttattttttaatatttacaaaaatattataccgacgaaaatatttatatagacccggccgcccaagtagagggcatcaaggtgacgtggcacatggcgccgtgtgcatattttgcgttgaggtcccttgccggcaagggggtaaatgtaattttcgccgcatgcaaaattcgcatgtccgctcagtggcctctagcatctggtcacacaagtcaccctgcccgagggcgacagtgtctattttttaaatatttttgccggtataatatttctataaatattaaaaatataaatttaaaaatgaaaaaaattccctacaccgggtccagtccagtcgtgaggacaaaagatttgggctatttgaaaaaaaacatagaaataggaataacttctattccggggagggcggcagagtctattttttaaatatttttgccggtataatatttctatatgtattaaaaaatataaatttaaaaatgaaaaaattccctacactgggtccagtccaattgtgcagacaaaagatttggactctgtgaaaaaaaaaacagataaataggaataacttctactccctccaaaatagacccagaaaatatcccattatattttagaacaaaaatagaactagtttggaaaatgtgttcacagagaacgatgaaatagctgttgtgaaaagctatatagaatgcacccttactacttctagagttcttaatttataccgaaaatattatgacatatagcattcaaaatttattttaaaatataataacttgttcacctatattctattctcaaccaatcataaccttcgaccatttaaattcttcacctatactactctttcgaaaacataatctttttttatgtttaatttcacttacttttttaacactacgatctaattcttaaaacttcttactccttgtatattttaggagggaggtatttgtttgatcatttttacgttttacaaatcatatttttcataagcagcgggtgggaaggatttcggctaagggtgaaaatggtataaaaattttccgaccgtaccgataccgtttccgtaaaattaatagtgataatatatttaccgacggttcttgttgtcaaaatttagtttttttcaatttatgtcaacgtgataccgaagttgatactatatagttcaattcataaatatgaaaattttccaaccatttccacctgcttttttttaaaaaaaacaaaaaaaacaaaataaaggtatcgtttccgaccgttttcatccgtaccggctattcggtaattccggccggaggggctctgaaaaccgatgaaacagcacgtacggtgcgaggccctgacttctgagcaaggcttttgtagccttgcgctgttgcacacgccacccctcctcccctccattaaataatgcacacacacacgcacgcgcacacaggatgacaggaaggcacaccgatatataactcctccctcctagtatgatccttatcctgttgtccttcgtttggggtggagcacagcaacacagcatgattgatcccgtgattgattaggccccggattctgtatgcccatcatcccactgcacagcttaatgatagacttaattaacagattgtataattagttccttgctggagaggaggccatatattggctggcactctcaagacggtaggggaaaaagaataaaattcctaaatactaactccatattttaacgtatgatatcgttgacttttcgtttaacgtttgaccattcgtcttattttaaaaaaaattatgtaattgttatttattttattgtgacttgatttattattaaatgttctttagcatgacatatatttttatatttgcacaaaaaatttgaataaaatgaatggtcaaaaaagtcaatggcatcatacattaaaatacggagggaataacatttatggccttaggcacatatcgtgattagtgataaaataatagtgtatagataaaacttttacatatatgtttttaacgatttaaaagataattaaaaaaactttgttaaaatcgtcaaaatcaaatttataaaatttaaaatttaacggtggtttataagcttttggtaaaggatgagaccctatgtagtaaagtcaaccttttggtataggagtaaaaacagctagtccgcttaagccgagattcgcgggaaggataggcgagagcaaatacagtattacaccaagttagtatatgatgaattcgctaaaaattacgaggttaggatacgtgaggttatcaatatcatgcacatgcagtatctataccccggttcgactgaaaaaaaaattgggatataacacatgaatgtcaagatgtgaggaaaaatatgaggtgaaaatcacatatgcagtggacaatggactttcgatagaacatatgaatgtcaagatgtgagggtaaatatgaggtgaaaatcacatatgtagtggacaatggactttcaagattcatccacgtcattacaagtagaaattttactcacggatttactcatgagtaaaaattgtactatttttactcatgatgatatagatgaatctcgaatatctatttttcgatctaacgttagttttcaagtttcacaatatttatttccaccacatattttcctaacatgtgaccgtgatctcacttctatctggcacacaacttattcaaccatactttgccacggagacgtggccgtacgatggtgccacgtacgacggcacaagcatttcacttctctactattataaaaattgtacaacagcaccagcatttctcttctctactattataaaaattgaagatattttttccggtaccttggtacgttatctgtgtatgagtcggttttaagtttgttcacttttggaaatatatatttgtatttcagttggtttttaaattcgttcattttgggaaatacatgaagagtcgtataagaaatctctttaaaaaaagacttacatgctaatttgagatgatcagactcctaattacaactcatgatttttctagaaaaatatatatccaagtgaattctcacagtgaaactattataaaaattgaagatgtttttaccggtactttggtacatcatctatgtatgagtcagtttttaagtttgttcgctttaggaaataaatatctatttttaagtcaggttttgagtttgttcgcttttggaaatacaggagcagtcgtataataaatctctttagaaaaacttacatgctaacttaagatgatcggactcttaattgcagttcatgattttctaaaaaaatatatccaagcgaattctcacggtgaatttcaccttaactaaaccgtataacaataatgaaattaaaatagccttcccctgttacaacgaacggataatttttctagtgaataaaatattcctttatagattaactacttaattatatgataaagtaataaattaataaataaacgtaacaaatactcattttgtcccgaaatatggttgctttctgatgttaatttggttttaaactatagctacttcttcgcctcctctatcacactattaaaaaagtatttatgcatgtggtcaaaatctatttttccattcagttggactctcaatatgcctgaaggcgtctgtaaaagtcactatttttccatgcgggtggagcacatgcacgcgaaaatccgtttttcgcgggtgggtgcttatgtcacccgcttgcgaaaagaaaaatcacgaaaaaaaatcccaaaaattgaaacccgaaagcctagctagctcttagtctgtcgttgctcgttgtcaccactgccgttgccgaggccccgtagctcgagatccatcgtcgtggtcgtccaccaccttgccgtccccactcctttgcagacaggagcgcttatgacccacctacagtttaagtttaaaatgggtttcgtccagaaaaatcagttctctcaaccttttgcttttgtatgttttgtgtacagttgattataagttgtaatgcttgctagcaaccaaatttaatttgtgggtgaaacttttatttatgtatatgtgtgtattattagtaacttaaaattaatactgaaataacatgcaatcagcaaacttcaaaattgttgacgggctatacccgtagacgggatttataagtatggggattgttgtaaccagggtatacgcgagactgtatcaagcagacaagaacgcaaagatttatactagtttgagccctcaagaagattaataatcctagtctagtttatattgatttatagataaaaatagcacaaagattacaatggggtgtaagacgaataaacaaaccgtcaactagaagctgtcgacattggcccgacgagatctattcggcaaatacgactatggcttctcccggattgcttctcaatgtggctctggctaccgcttgtaactcgatccccttctcggaattaggggaccttgtattcactatttatagtgtagatctatctttttctccaagtataactcgaagagataaaataggatacgggttggaggagaccttatctttttcgaataagattctgaaacattctattccaggaaaataatttcctttctatttgtagtatttccttaatgaaaggatgtgttcgcgtaaacaattggttatatggtgttgtcatattccatgagtccgtgtataggagatatctattatccttacactaacaaaaatcaactctaaacttaagctttaaaaataaattttaactacaaataaataaagagcaaacaatagagtgcaacatctcaactagttacaaatatctcttatttaatttctctacctacctctcatctggactagtcgtaactaattttacccctctctcttggagagaaagctcttgaagtggttatatttagagatgaaaggagtaggttaaaataattagtgtaagcaaaatacggtaaaataaattttctattactcactccgttcctaaatataagggattttggttagatatgatgtattttagtacaataaatttagacatgaagcctgtccagattcgttatactaggatatattacatccaactaaaatctcttatatttagagacgaagggagttgaaatgtaaaggaggagtataagacaggccaagactacacagtacagagttagccaagattgacatgtggctatgttagttacctatggttgagaataaatcggtctaacagaactgacttattagcatataattaattaagtattaaataaaaaattaaaaaataaattaatatatttttacagtaacagttctataaaaatttaataaaaatatattatttagtagttcgaaaaacatacaggtgaaaataagagagttatcttcacttaaaagaacatttagtcaagaacacaacagttgggtgagcaagaaagaaagagagagaaagttcgaggaggccggttgagaaatgaatttatttgaattttttaaataacttatatatagaaatttttttataaaatacacatcatttagtattttagggcctgtttagattccatggcaattttttttatcctgttaaatcgaatattttaactaaacaggcccttaagcaaacatcagttgagtgagcaagccgcaggggatctataggggccagttgagagttgagagagagtgagtacgtcacgtcacatcatcaaagcggagggacattaccaataccagcaccggacgggtccactccaactccatccattcatccatcgccgtatcgtccgtcctcagaggcccagaccaggcagtttcagtttccctggtttcatgctcttaccttttgttgtctcgccttttacagttttactactactgtggccctgttcccacacaaaaaattttcatcctgttacatcaaatatttatacacatacataaagtattaaatatagaaaaaataactaattacatagattacgtgtaaattacgagacgaatcttttaaacctaattgcgccatgatttgacaatgtggtgctacagtaaacatttgctaatgacgaattaattaggcttaataaattcatctcgcggtttagtacgtaatttgtttacaggtggaatatgtaatttgttttgttattagactacgtttagtactttaaatgtgtatccgtatatccgatgtgacgcattaaaacttttcacccagctatacatgactaaccatgccacttggagggtatcgtgtaaccaaaatttattcatccctatttccaacaataatttacttactcatacctaaatcaaatgagtattatcctaacccaacgaataaaagaaaaaacatactcctatatgggttccactcgtagaaatggactactaaaatttatataaagttgctctttctacataataaatcattcctctgaattttagtcaaattagataatattttataatgtgaacgcaagtctaaaagttttcggcccatagtgtgggtatggggatggggaaatgaaacccattgataagtgtattcatagtattttgtgtttagacttggagttaaatttttgtaagaagtgttggtatataggtttagttgaagcaaatgcctgtttatatgttaattatctaaaatattgttagtatctatgtagtaataatatattatcagtttcctaattatgactaccgtgatagatgtacatgagtatgtgtttgagtttctgtatcagtttcctaaattttgtaggctgatgagtgatgacagtgttttgcgtggtcgacttgctagtggctattgcatttgttgtgcccctttgtaaacggctacattctttcttaataaattttgacaggcaaataattcattatctaaaaggaaaatattatcatttgtttgcattcatatgatgtatcatatatgaaaaacctttaaatttgcatatatttttacactatctttcttttaatcataatcattcgttaagttgaccctgtcgtactcaaattctggcttcaccactgttttcatgagtcatgactatatcttgaaaaaatacaattgcagctatataaaaaaaatacaatatttgtatcttcacaatatgattatactttatatcatgggcagtatatttgtcctccattggatcacaaatataaatatatataggatttaacttttttacacaacaaaagcatttatgtgatactgatactaatgcataggaatttagacatgtttaaaatgccaatcatatgcttagaaagtgattctaaccatttcataattctaaatttgacaagtgaggtgagtttgatggattttccccctcaactttaatctttactaaacaacctagaaatacttaaatttagaaacagagggagtatactcttatctttcttttttgttttgcattagatatgaaatttacagtgtaaaacactttctagtaattttttatttttttatataaaaagcatggtgctacaaatatatatactaaatagcaccagaaagaattcatcaacaccaactaaaaattctgggctaaaaagatatatagtatgagagagagaggaggtactattggtggcctcaaaaataaaaatcaaatagaaaggatcggaatggggatattctccgtccgttgtttttccaaatacttcgaatggaagatatttttatacatatctttggcaccaccattattattgctaggttaccattatctgtcctgatcattaattagcataactactagattttgacatgacatgcttgggtcatgccacattaggaattggcccaagttataccgggcttcatatcttgaacgaatgctgggttacattccttcagaccagaattttacacagattcaacatttttagtttaattccaatgaaagctctctaaaatttcttggatccaactgagacctaaagccccattctaaaaagattatttaccaaattattactacattttttttgctccatgcattaaaaaataaaacaaataaaaaaggtttcttctactctacttgcttagacaacttgttcatatagtatttgacttgtcagttgtcaccgaggctcattagccagcaccgaggagatgtattgatctactgacgcctgatgagaatgaaaagacagagtttctcatcttttggctatctatttgtgtacctagataaatcttaatctggagatagtgaagaccccagcatcgcctccccgcatgagcgacccaagcgaaaaagagaaaccgtaatgccgccaccttctcccccttccgtccccagagcaagcggccgggcttcggtggggcaagcaaggatgacggcggcgaggcagacggccgtagcggcgggcctagatctgcatgggggagaaggagccgacgcgtggtggcgaccgcagcgatctagcagcgagatgattcggcgacaactgcagggtggaggcgacgacggaatgcgccatcggcaaggcaaggcaaggcggcgtgagggtgttatcggtcaaagttggaaggggtgacggccaaatcggccccctagcccagatctggccacccctgtcctagatggaggtggccggtgagcaagcgatgggggtggccggtggaggaggagtggtagagctggtggaggtggagttgtagggctggcagtggaggagttgtaaggacgggggaggtggagttatagttgaccggcgagttggggcacggtagaggtggaaataaagggggattgatgaggtggagaggtgctgctcgaggtagagttggccaacgagtgcagggctaacggaggtggaaatagagccttggcaggcaatgtgtaggtggccagaagaagtggagaagcagacacaggcccgccggtttaggaggtgcaagaggcaaggcacacaatttggcactggcaggaggaggctggcgaggtggtcggcggggtgtagtaggtgccggtaggtggagttgccacatggagaggctgttctttggctgatcgatcgttcgttgttgcaagtttgcttgtttggaaagctgcgggacacgatgaacaaatgtgtggtcagtgacctggtcgacggcaagggatccccataaccggctgaagttctcttctcctgttccttggaaccccttcccttctttgactagtctgtttctagactccagtcaaggggtgcccccatgataaggagagagacgcgggttctgttggagggttctgcttggtagagattaggatgttgtcaactctgtttgtgctttgaaagtctttgtggcagcgaggtgtgtggtcttttaggttggtggtgcatgaagctcctgtggcacaacctttggttgatgagttcggatggagtcggatctacttgaccaggtatgacaagctcggtaatgataacccttatctttcatcttggaagcgtctaaggtgttgtgtgcaggtggtctcctgacgtcattgtgtgttggtgtgttgggatggagtcggagctgtttgcaagggatggcaaactcggcaacgacaaccctcttccactttcatcttggcagtgctgtaacggccttggttttgtggttggcagggagcgagagtctgggtgaaagttctgcttggtctttgactagagctaacgacatcgacacctatgggtgccgttttcttcatgaacgcattgtcactttcctctaatttttattcgggtgaaaaccttgttctgatgctcatatggacattgtttgcgttttggacgctttcttcctccttggaggcttcgtctagaagaccctgccctacgttttcttggtcgttttggtcatctagttcgtggtttgttcttaagaagtcagagctgctcttttgaggttagcaatgttaacttgtgtcttgaacttcagttgtgccgccgcatgcatcctgttctattcctcgtgtgggcctttagccgattttccccaattaacgtgtatttgtgaggttttttttgaccggttttccttcaaaaattggaccaagtctcttcttaaataaaagcaagcgctccctatcctattttgaggtttaccttaaaaagggtgaatagccaatacggtccctaaatttccactttgggctcagtttagtccttgatgttttaaatcgtccaaacaagtccaccaaattaatcatttgggttaatatagtccttggacccacaaaaaatgccacgtgagcatgctaagtcattctctcatgtagtggcatgaatgaaatgaccattctacccttatataccatatagaaaagaaagaaaagtaagaaggtaaatgtttcacacgtgtatgatcgttttggaactgtcacttaggactgatcatgtaaattcatttgtcggccacccatctgcaacaatgctgggcctgggctggcatgttactttttctgtttgtatcttttctttcttttctatatggtatataagggtaaaatggtcatttcattcattctgctgtatgcgaggatgacttagcgtgctcacgtggcattttttgtgggtcaaaggactatatttatccaaataattaatttgggggatttgtttggacgatttgaaatctcaaggactaaactgagcccgaaatgaaatatcagggaccgtattagttattcacccctaaaaaaattcactaaacctattacattttgaaataagaacatagattgtttcataaagctagagatttttgaaatagctataacttccaaaggttctcaaaacagagccggctgaagatagaagagatggagcagagtaagagcatcctcaacagatatgccatccaaacatccatcgagaaaatagcggttaggagaagaaaaacgtcctccagcagatactccatcccaccatacaaatttaatgcatcctctatttggcagagaaaagtgccaaatttggcgttcctctctcctcatgccatcccgcaactgccagcacccaaaccaaattaccgccctcatccagatcaatgccccgtcccggccttgccccatccgaatcgactcctctcagagactgggtggtggtggcggtgggccatcggcgggaggaggagggagatggacttgccaggaggagggtggagaaagagaggcatatcggaaggacagtgtcaccgcttgcatccatgtccgccggccactgcctacctcctccgcgcccgcccgccgccaccgcttccacttccgcacccgccagccacctccatccggatcgagccatggagggtgaaggtagagagaggagagaggatgcgccggtggccaccttcgccggccactcccgccgtcggccacttgcgcccgcctcttgcgccgctcctccgccctttgcgccgcccgcaccgccgcccatgccactcctccgactgcgccgcccctccgcccggctgctcctccgactgtgccaccctgccggtcagctctcgtcctccccatcctctcggcggtagaagagagagaaaggtggggagattattttttagagttgtgaagggtgagtataaatatgtggtagttgtaaaatattagtaaaatataggatgttggtatatggaggatgtaatatagatgatctgttgaaatgaaaagtaatatggagtatgaatctttttagatgactatctaaatgggagtatggaggatgaaatttagatgagctactagggatgctctaaggattggaaggtggcatggaagaatagagggttaaggatgtagaaggctctgccatatcatcctcccagtaggcatggaagagtgtggtacatggaattggaatctatgtaagtgttgatttcttttatattcattctatctcaagcatattttattttttttaaaaaaataatcatatttatagttttcatgcatccaagacttaaataaatatattatctttttgttttagtgttagattaaattgttgatggaacctgagaagttgttgtaatactcgatggtctcatgcatgatacaatttcttggtgtttatttacatgtgagattattttttccttagtcttgataataaaagaaatatatcttacactttcggatggagagatggagagagtacattgtaggcccctgtcatgctacatgtattgacatggtaatattttactcattgccaaattaaggactcattttttgcaaatagctaagtatcggtttgttcttaaccagaaaaaatgcccgtgcattgcaacgggtgaagtctattttaagataaaattcactgtgggagtttgcttaaatatatatatttttagaaaatcatgacctacagttaggagtccgattgtctcaagttagcatgcgagtttttttaaatatatttcttatatgattccttctgtattaccaaaagtgaacgatcttaaacgatcttagaaaccgactcaaatatggatatgtatttctaaaagcaaacaagcttaaaaaccgactaaaatacggacggcgtaccaaaaaaccagcaaaaacattttcaatttttaataattgtagagaaatattggtggagagaaaaaataaccttcttatgttttacgtggtactgtctccaacataagagataacatgtttttcttttatcatttctcgcctctagctaaattttttatgatgataccatgctaaatggcgacaaagatgtcatcaccaacataccctcaccctttactttgtagaccagagatcaggttcttctaaccttaaagtcactgtgattttattattaacatgcagatttaggtttttttggactcgtatgttagcgacaaaatcacgtaactttaaaattaggagatcctggtccctaaagtgatcataagtgatatactccgttaaaaccatgttgttataatatgtttaatttaaataaatatttttaatatccacatcagacagataaaatcagctgcgaattggggtttggggggggggggtagtgtatgcagcacacatcaatatcatacttcctccgtttcacaattatctagattcattaacatcaatatgaacgtgaaaaatgctagaatgacttacattatgaaacggatggagtagatctagattcattaactgtaacaccccaggtaaccatgtacctagagtggcacaccaaaactacactcaaaaccactaactcccaaaattattacaaatttcggcaaagtctcccctaaaaaatacggacatccacgacaggcaattataagataacacaataacgatataaaccacacaatccaaaccatcctagctccataagttccacgcgaaaataaggaccagaactttaaataacctctacaagttctatgcaaaactttgctaagcagaatcatagtctaaaactaaattccaataatgtgcaataataatgtgtagtccagggtgctactcccgtcccatgccaatcaatgtcattaggtacctaaaaaccaaattaaacacaagagtgagtaaagaatactcagcaagtacaatattgaactagtaaaacatacacaggtttatgcaataagaaaaccaatatgaaacatttgacttcctttaatttaaaacgaaggaggcaaaagtagtagttccctcccgggcaggtgtgaatatcctcttagcattaccggtaagccgagcaaacgtaatcagcgcttctcaaggatcatgaataaagatccaaattgcactcccatgactacgcatggtacttgaataatgtaaacaaaaacttccggaagaatgaaacatgaataacgtcgtgaacttgaacatgaagtgaaatatgaatacgtagcataataccaacaccacacaattgataataggaagcttcgaataataattgggtaaatgaaaccaaacaaaataacatagtttatccatcacacaagtccgtcttgtacttgccttaactccttcgataatccgactcaactcctccaacgttggaaccctccacacccgtggagccaaaactacgtataaactactatatccaactaatgatagttacaaggatatttactaaaatcgaaacccagttcatacaaatttttaccgatttgtgttaaataacctatagctattccattactgttttgttttatatgtaactcacaaaccgtctaacggaacctagcaaataatacaacttcggacatccagacaaaattttctaccactttcatgttgagcacaaaatcagattatgcctatgaaatcccagattaaggaaaacgaattgctatcatgattttcggacccggtcagcagtactatttttttgttgtttctcccaaaccgtttatcggaatcgagcgaaaccagcgctattagaaagatatcaacgatggctacaaactttatttaggacaaataacctgaatcctaacggtttaataccagatttgaaaatacggtttcagcctataatcaataacctcaaaaattgcacaaacggctatctaataaatttctatttaaatattatacttctagggagtaaacaaaagtaccgttgcagcgaagatactagaatttgagaacaaacgcactagttacgaagtcactgaaatccccaaaattgcttggcctttctctcccccttcttcctcctgttctcctgttctcctgcacccttctcctctgaccacgcagcagcagccagcaagaaatcatcagtagcagcagcagccaaccaaaacaacaggtcgacaggcagcaggcaaggttgggtcgacagcagcaacaagctcaccgggaaggagaaaaacggaaaagggaccactggtggctgcggatgacaatggctgcggggtccaaccacggctgtggcagcggcggcgtagaagcggcgccggcaacagggagcagcagcggcgacacgcacgcacgcagggacggtggcggctagggttagcttcttttttttttctttttcttttttcttctgttcgttaaatagagaaagactaatgaagatcgaatggcccacattaatttggtcactgggacttcgttcagacctcgattactataaactttattttacactactcggcgagctctacgcatccacggttcctgatcgcctattcgaataacggttttaaaagttaaaattttgcatgtttgttctaatattccccgaaatatacaaattgtaaatttggggtattacattcttcccccttcaatctaattcaccctcgaattcacccaaccataatctagaacactgggtattacattaacattaatataaacgtagaaaatgttaaaatgacttacattatgaaacggaggaagtagtaacgtatatctgcgaccgaagagactattatattaaaaagtttgaagaacgatattcgtcatctagatatttacgatacaaataaattaatctgcataacatcacctcacacctgaagaagtagtataagaaaaactttcacgtcagaatttatttattttttgaatgcttttaccaccgcagctacttactcctatatgagattctggccggacaatgattggcaaggaattaaagacactgaaaaaaaatgctgtctaaagagacacagagaaaaaaacaaaacaaagcagcatagcagcttgatcattctctcccaagacagtactaattattttttcgcggtgatgttagttagtactactgctaattactccctccctccgtttcgaaatatttgacactgttgactttttagcacatgtttaaccgttcatcttattcaaaaacttttgagagatatgtaaaattatatgcctacataaaaatatatttaacaatgaatcaaatgataggaaaataattaataattacttaaattttttgaataaaacgaacggtcaaacatatgataaaaagttaacggcgtcaaacatttcaaaacggagggagtagtagtactagtacgactacttagtacttaatttgatcggccactcacatgtactatgcttattgtttcttttgacaagaaatcgagtagatcttgtcttatcctatcattgatgattaacctaatcgtactatagttcaatatcactaattaatctactgcatcttgtgcaaagcgattaattgtttacacaaacttcaacacaatcgaaggattaggtcagtggggtttggttcttaccttcctgtggtgttcgtctgctgaatactacctccatattattttaatgtatgacgccgttgattttttatctaacgtttgatcattcgtcttatttaaaaaatttatataattataatttattttattgtgacttgattcatcatcaaatgttttttaagcatgacataaatattttcatatttgcacaaaagatttgaataaaacgatggatcaaacgttgattaaaaagtcaacggcgtcatacattaaaatacggagggagtttttttttatgccccaaaatataaagcatagtatacggagttctttcttaattacatgctcatcaacactactatactttaatagttattaatttgtttgtggttatattatgaataattatgaagctaacatcatataaaactattttcaaattaatacgactgtaacgatataacatccatgataatacgtatctatattattagtttaattattactaaaaattagaaatgttgatttcccaacaaacatatagtcacattattaagcatggaggttggtcaactggtaatgggcaattggttagactaaatgtggtcctaatgttcaccattaaattactatcactagtacacttttctcttctagtaaaatttagtgtagataactagatcctaccgtactgtctaggtacacagtactccattttgcagtacaagttcttgttacggatgcgtggtttaacagtgtgatagtataatttatttttgcaagattttggtatgaagcgttactgattagagcaaccgaaaaaatgtactccatctgcttcaaactatttaccgttttagcatttaaaatttatgttaaaatacttatctttatcacatccaaagcactttagatgtctttccctttctacccttctacactaaatttaatgaggatagcaattgtattttactcctatccactggtggagaaaccatctttggttggtccactagatttcacaaatagtcccggttatattgaaaaccgagactaaatatgttttagtcccggtttgaatgctcagagaaattttttgatctttagtagtggttggtaacaccaaccgggactaaaagatccatttatagtcctggttggtaacaccaaccgagaaaaaagatcgatataagctttacttccagttgatgttaccaaccgggactaaagatatatttttagtcccggttggtaacaccaactgggaaaaaagttgacataagtgggatggttgcacgcgcatcggatcgatacaactcctcctctcctttttaactcatctcctcacacagttacacccttatctcttcctctccctcctccctccttcccacctccccacctccctctgcaacggtggggcgcggagtgccggccggcccgcttggcggcgtggggcgcggagggccggccggccggcgcggcggcgcggcgagcggagggcgggcgaagcgacgcggcggcgtactggcggctggcggcctcgcggcggcggccgaggacgcgccgggcggtgcgcggcggcgcggcgcacggagggctgggcgagacggcgtggcggcgcgctggcggctggcggcctcgcggcggagctggggacgcggcgggcggcgctccggcggccgccgcggcagtgggccgttcgtcttctttcttttttttttggttgagaatctgtgattcggatctgagatgatttgtgtgtgatgtgaatatgtgatgtatttgatttgtgtgtgatgtgaatatgtgatgtatttgtgatgaattttgtagaagttgtaatgtaattttttaagattttgtgatgtatttagagatattgatttgagaatttggagactattcggggatgattgatttgggattttgggataggatagagtgaatcaatatattaaaaacaatgaagaaaagaatataataaagtagcaacaggagctagcctctttagtcccggttgttgttaccaaccgggactgatatttagacctgtatttttactcccggttttttcacccgggactaaagatagagtctttagtcccggattcgtagtcccggttgaaaaaccgggactaagggggttaaaaccgggagtaaaaactctttctccaccagtgatcatatcttctagtttaatgtaatatatgccagaacgataattaattaatttgaaatagaggaaatacactagtgtaccgaattcgttgccacgggctaccgctcataaccaccgtccatatgtgtcatgtacgagagctatattaccattgaagctgcattctagcatgttattttttttcaattatgaaaatcattagagcttaatcggcaacgctctaagatcatatcaagaaccttttgaaattagtgaaatgctcttaatattataaaggtatatgtaagtataaactctataagatatgaagctgaaggtagagtcctcctagattttttttttaaaaaaagaaaagtaagagcccttttttttgaaaaaaaatatttttcttttttgagaacagtaagagtcctcctagcatgcccttcccttattttcggggatatgggaattgtaggctagctagctgagcatatgcgcagcatattctaagccgcactgaaggaaatacgagcatcgcaaagaaaatatctcatactcctcgtactccctctggttatataataattaatgttttggacaaggttaagattaaacttttataactttgaccatcaataactttaaaaatatttagtttaaagacatatatagatttgtctttaaaaacactataataaaattaaacatgtatttatttattatatatattataatagaaaataaggtcaaaggtatatcttgtagagcgtaccattgtccaaaatgttaattacaatgaaatcggagggagtatgcatagtatattgcccaactagtcatggtaattggtaaagggaaagcacccaagctatggggaataccgatactcgtattaataggtacacacccttcgaaaaaaaaaatcatcctcgtagtcgaacgctgtaaataaatttattccgccgattggttcccgtacagcacgaagaaacaaaatcatatctgcttcgttaaaagtagagagatgcggggaaaaggcttttgaacggtagctgcttctttatctgtttcttctactttttgtttccttgtccttctaatggtggggccgggcctccccagtgagttgcgggacccaccgctccagtggaagaccagattctttaggcctggtttacttcccaaaattcttttcctaaaaacgtcacatcgaatctttgacacatgcatggagcattaaatatatataaaaacaaaaactaattacacagtttgtatgaaaatcgtgagataaatattttgagcataattaatccatgattacccataagtgatacagtaactcacatgtgctaatgacggcttaattgagctcaaaagattcgtctcgtggtttccaggcgagttatgaaattagcttttttattcgtgcccgaaaaccccttccgacatgcaatcaaatatctgatgtgacacctaaattttttttttttcgcgaaataaacacacccttagtccatgagcacaggtgtagtagtagcttcgaaaaaaaatactaaaaaaaaactccgaaaagggagaactgaagacctaaatacgggaggaggtgaaattcaaggggttcatgttcaggttcaggtggccaacacatggccttgacagtccagttcagcaaaaatgcatggaggattatggggtatatacgagctctcatgctaagacattattgttagcaataatgcagccaaataattgggtcaaattctatctaagctgccctcctgcctctggggccctgggcatatgcgttttggatgggggccactagctcgtctcatcgcctgacattatattatgatgatgatgcaaaaggagaatcgaccatgttgattaattgtcgaagctgagcgttattcggatggatagggaagggtccatcagtctccatgcattggctcaaacaagatatgagggcaaattggtccttcatcctctccgcgcgattaatattagtagcgcctttggcgagggcaaaatcggctattgtcctgcggtcacaaatagttccgcttgtttgctataatacattatgtcgattaaaattatatgttcggataatcgggcaaaagcagggtttagaatcttgttaaggatatctgtcgaaacataaattcggcaataataaaacggggtagcgcacgagacctaaaagtggatggatgtggagacaaaagatttagacaggttcaggccctctcgatgagaggtaataccctactcctgtttggggatttgaatccgccgggtgtagtatagatctgacgatcaagttgactcatgccccctagagggcttcctgcccaccttatataggatggggggcaggattacaagatagaaaccttaaccaatacggtatcggtttcctaaatctactttacaatcttatcaaaccaggactttaggccgttccataatatatagggaaacgtaatacccaagtcacgatctgttacatattccatacatatatgttatcccctattactagtcggataaccatgccgtgtggatatggggtacccataatctccacagtagcccctgagaccttcacagtcgaaaatataatcttctctcgaactagattactccaaagccgagtgcttcaatcatcttcgccatgatctctcgagtactttttctaaatcagaagactgtggagggctgaaaaaataaagtcaggtgcatcgactagatgcaccgagtggtttcgacaattctagtcaaccaagcgacttaatattaatatgtagcatatgcgatgtgaatccctgaataatatgatccaagtgatataccgactgctttgtaaaatatgatgagtgtaacctaaagttggctacattattgaaaattcacatagcaaaacagctataaagaagcttgtatgttgtgaataaataaatttccaaagtattgggcatacgccatgcgcacactgctttaacagacgtgctttagtccctaaaagacacatggtttcaccacacctggaaatatatggcatatgtggtgtaaaatccgagtaaataaactcataaaggatttaccaaccgcctagaaaatgaccacaatatataatcagcctaagccataatattggtcaataaaaatgcacacttacgtggcgaaaagcaatgatattgtatccaatcaattgcttaaaaacccaaacagcaccttgacttatatataaaaaaagtcagcgggacagctatataaagctttactgtttgacaccttttaagatgcattgtaccaactcctaaaaagttaagtaactgcggtataaaaggattttaaggtattgggcacttgatcacgcgcactttggcctaagcaaaaagtgcctaagtccctaaaagaacgtgacaggccacacctgaaaatatgggctgcagacatattaggcctaggccaaaaaatatgccttcgacaccctttaaaggatgacgcatataacatgctcccgagtaataaatcttccgggtaatatagaccaagtgtagctcatatgaatagcttctgatctgaatgattatcccttatgggatactccaaaataaatataataattgaatcccgactggcgcaagtattcagttgataacccttacggtgaataataaatagtccagtctttgagcatagaaaatagacccatgatcacgaattcatattgcatatatccagagcaagtccaaattgaaggtatgatatttgtgtttgagctagtaagcccctgagcatatagcttgtccttctgtcgtagtcacaattgtccattgatgatagctgacgcagttggcatagagacaagatgaccaacatagagataatattgcccaccagaggtggcaaaaatattggtggtagtgaagatagtgatactaatcaaaagtgatgaagttacacagccgtggaggcgaagaaaccagtcggcagtagtcaggtcagccatcaatgaagatgaaagcgcccagcgataaagttgtgtagccatggcagcgaaataatcagtcggtgacagacgaggcaaatcaaaggcgatgacaaaatccaccaatcatggagatgaagaaaatagtcggcgatgacaaatgcaactgacatgatgaagatgacgatgtcggtgatccagtcaatagcagtgtcgcaaccaatgataatgacgaagacgctcatcagcatttgcatagtaggtcaaccgtcaaggtgaaataataagtcggcgaaaacataatcatccattagcaacagcggagatgtcagggccgatgaagcagaggtgtcgtccaaaccgaaatatttgaagttgttgaagtagaatgtctgctccgaatcaaagatgaagataatgactcctggagttgactcgttggttgatgaattgatttcttcagcttgacataaaatttgtcaaattttgagccttgtatttgtgtagcccccgactctttgattagttgggaaacaactgaacatagagtcgagaattatagcttcttgtcgtcgaatagtcattgcttgattgaagatatgtgttgaagatgtccaagtagaaatcctgaatattggagagcctcttgttgtagtaaaataacatggcattgcatgccgagatgtcgaggctcacaaagacgtcgtggttggtgaagtagcaaaacttgcgaagtagcagcaatagagtttgccagtgccgaagataataaagatgaagtcgctctaccatgatgacaaagttgcattgccgtgatgaagtgaacacaagtcggcggcaacagaagcaaaccggtagtgaagacgcgcagttgtgaagataaaagcaccagtcggcggcggcataacacgagtcggcggcggaagacgatgatgtccatcagtagtggtagctgtataaaccagatgtagaggcgagggcactagtcagcagcagacgagacgaccggcgatgaagatggtaaggccaatcaacactggcagaatcatgcagccatggaagtgaagaaaccagtcggcagccatggcaaacgtaggcagcttgtattgaagatactgatgcctattagtagtgacagcgatgtagccagccgtgaagaagatagcatcagttggcgttataacaggccagccgtgcaggcggtgccaccagtcggcggcggacgaggcggccggtcggtgaagacgtagacgcccaacaacggcggcataataggccagccgtgcaggcggaaacaccagtcggcggcggacgaggcggccggtcggtgaagacgtagatgcccaacaacggcggcataataggccaacgtgcaggcggaaacaccagtcggcagcgaacgaggcggccggtcagtgaagacgtagacgcccaacaacggcggcataataggccagccgtgcaggcggaaacaccagtcggcggcggtcgaggcggccggtcggtgaagacgtagacgcccaacaacggcggcataataggccagccgtgcaggcggaagcaccagtcggcggcggacgaggcggccggtcggtgaagacgtagacgcccaacaacggcggcataaaggccagccgtgcaggcggaaacaccagtcggcagcggcgaaggcaagccggtcggtgaagacgtagacgcccaacaacggcggcataaaggccagccgtgcaggcggaaacaccagtcggcagcggcgaaggcaagccggtcggtgaagacgtagacgcccaacaacggcggcataataggccagccgtgcaggcggaaacaccagtcggcggcggcgaaggcaagccggtcggtgaagacgtagacgcccaacaacggcggcataataggccagccgtgcaggcggaaacaccagtcggcggcggcgaaggcaagccggtcggtgaagacgtagacgcccaacaacggcggcataataggccagccgtgcaggcggaaacaccagtcggcggcggcgaaggcaagccggtcggtgaagacgtagacgcccaacaacggcggcataaaggtcagccgtgcaggcggaaacaccagtcggcaacggcgaaggcaagccgatcggtgaagacgtagacgcccaacaacggcggcataatagaccagccgtgtaggcggaaacaccagtcggcggcggcgaaggcaagccggtcggtgaagacgtagacgcccaacaacggcggcataaaggccagccgtgcaggcggaaacaccagtcggcggcggcgaaggcaagccggtcggtgaagacgtagacgcccaacaacggcggcataatatgccagccgtgcaggcggaaacaccagtcggcggcggtcgaggcgagccggtggtgatgttctgactgatccattcctggagtgtaagagataagcttaaagccatgaatcccttttatgcatatctggatctggatcctgcagaacaaacatataggatgagtagtatctgatataaatataatactcgagaaaaatgcaagtattttaaaatatttataaatatgtatttctcctcttgtcaattttgatttccccgagcagatgactcattacgtttaaacgctctgtccgactagccatagcccccaagcaccgggagtcggcctaggcacttcccaaacatgcatatgagtgacatgagttcgtcattaatggaacaaagtttcacgaatcagaatttactactcgggtacttttgtaattgtaaagagcagaaaataaatttattttatctctatgcttttgatttattccgaataatacttagcaccttgcgttactcggtccatccaacgagcccccgggtgctaggaatcggcccaaaggcaaccatccattggcaaaccaaacggaaagcataggaagatagaactctataactcgataggtacttttgtactcagattatgtcgcaagcaatcaagataaatattataaaaaaatatgatataacatctgtagcccccgactcactactcaatggaagaccaattggtgtagtgaggcagaggaaaaggaaaaatatcatataaagaataaaataaatgatgacttagctttgtaatattccctcggtgacagcaaaagtagccgatgtgggaacgaagcagtccatcaatggtgacaaaaacaccagttggcgccagtggaaccaagccaatggtgtagatgatgaagcccattaacagcggcgaagtccgccaaccgtataggcaaaaacaccagtcggcagcggcgaaggccagccggtcggcgaagacgtggacgcccatgaacggtggtgtgaccaaccaaccgtataggcgaggacaccagtcggcggcgacggaggcaggccggcggtgaagtcgtagacgcccaacagcggcggcataataggctagccgtgtaggcagaaacaccagtcggcggcggcgaaggccagccggtcggcgaagtcgtagacacccaatagcggcggcataataggccaaccgtgtaggcggagacaccagtcggcggcgacggaggcaggccggttggtgagacctcccgagcacgcggcgggatgcccgcagacgcacgcgccacgggtgtagtcgggccgcgtcagccacgcaaggatgaagcccccgggcatccggcgccgttcccctagtatacttgcattgcatgcaaccaagacggacggcctgatcgcgaaaccgcgcgaggtcgtgtgcggcggctgtcggccggtggtctcgcgcgttctcagcgtggacggcttcttgacgtgcagcggctcgcagcggttcctgcgatcagtaaggcgatgcgacagtgatcatgatcatcagtcctcgtcaaccggtgcagacatgcaggcaaaaataaccagcaaaattaagattaataatctataatccaaaatcaatctaattagcatgtagcaggaagattagatgcatatagcaatgcacgtatgcccgcttctctgctgatcgatcccaggcatgcatggacacaagatgcatccggtgatttgaagattggttccatcgcactcgtcgacgaggaactcgacgcacccctacctggcgcgccaactgtcgaaacatgaattcggcaataataaaacggggtagcgcacgagacctaaaagtggatggatgtggagacaaaagatttagacaggttcaggccctctcgatgagaggtaataccctactcctgtttggggatttgaatccgccgggtgtagtatagatctgacgatcaagttgactcatgccccctggagggcttcctgcccaccttatataggatggggggcaggattacaagatagaaaccttaaccaatacggtatcggtttcctaaatctactttacaatcttatcaaaccaggactttaggccgttccataatatatagggaaacgtaatacccaagtcacgatctgttacatattccatacatatatgttatcccctattactagtcggataaccatgccgtgtggatatggggtacccataatctccacaatatcgaacaccaaggaatttcaatcagattaactatttcaaatttgggtttctcaaaaaacattcaaagttctcctagagaactgactttagcttggttcaagaagcttaaagttttaaaaaatcaaatggtcttcgttgagattgttaaccctgggtgaaggaaggaaaggaagatgggttgatcatattatttcccttcatagaagtcagtcccatatgtcatactcgcatacgtatttctttttgttaccaaatagttcttgtgacatatttagaaaacggatatatcaaatagagtgtccaagcgcatgtaaataaccgtcgtttttttaaagtgtctagtgttagtgtatacgcactagttttgggttgggctcagcaatgttgacgggttatacggaatcatgcttcatatacagaaggtgttttggataagaaaggaaaagcagagttttagttggatactacatggactactcagatcgtatctatacttgtctccctatttctacttgaacaaagggaatataaaggtataaatacaagactctctagtagaaggggggcacaccaatacaagtcaatacggatctaaacaataatataaccctagacatacccaatctggcgccataaagaccaacatgagggatctggcactacctccaatctcgtcgagttcatattcgaggatggaggctagattaggttagtccacatattatactcgtatgatactgatatataaaggcaacatcgacttcggccaacaggagtagggatattacctatcatataagggggcacaaacctgtataaaatttttttttgtctcccaacactttaacattaatctcgtgtgtaccttagcaccatcgtaccccgatacttcctaatattgtagtcacggtataacccgtcaacatctaggcatatccatatttttcatgatgtcctatatgaaaaatactactgtgccatctttaggatcatgccttactttcaagccgcttttattttttttttctgtccactgtttataagccgagtcacacgatattaatagaagcagcataaaatactccttccatatcaaaatataagcattttatttgaaggaaaaagtacgaattaccccctgaactatcgcggtcgtccgaattacccccctgaaccacaaaaccggacattcttcaccccccaactatgtaaaccggacgaattacccccctcgaccaatccgcggtggttttggtctacgtggcgtacacgtggcagtccagtcagtattttagtttttttaatggtgagacccacatgtcaaactccactttctctcttcctctatctctctccttctctctcttcatcagtcagcagcagcggcgcgcacgccggcggccggcacgcatggcgcggcgcggggaagggcaatgggcagcgacgcgggggcaggctggcggtcagcgcgcacgcggcgcgcggggaggtggaggggatgggggagaggcgggcgccggcggccatggcggagaggcgagccatggccggaagcgtcgggaggaggacgggggacggcggacggaggcgcgcgtcgggagctggagcggcgtcgggaggaggacggggaggaggagcaagagaggcggaagagggagacagcggcggcggaggaggaggccattcccgcgaccgccgctcgccatttcctccgcgcccaccttctgtcccggtggcctcccgcctcagcgtcgcggccgtcgcagcctaccggttgcccgctgcacggagggacgggcggcggacggtggatggcggcgcgtgggagcgggcggtgggcgtcggacggcgacgcgcgggggcgggcggtcccgcgccttgagacactcaaccagggcgtccaccacgtccccgatgctgaccacctactggtgcctggcggcggcgccgccattgttggcatggtggagcagctgagtgggtgacgcggacgccgccatcaccagggaggcggggactgggaacggcgtggcgcggttgacgccgtggcgggcgtggcgctcgttgatagcgacggcgaggcagcggcgcgggaagagcgtggcgagcaggtggtgttaagttcggcatgcatttcttttttgtgagatttggttattttctcgatcgtggtctgatactaacactaacgaattcctttccttttgttagttccctgtgaagatgatgacgctcttgcacctggagaaggagaccgaggagcagcaaacgtaggtggtctctacgagctgtacgcgacgttgccaccatgcggagaaggaggaaggggctggagtgggccttcttcttcatatgctgtagctggacgagcggtattggtcgatgcagtcctccgagtcgtaggcgagctcgcggagctgcttcatccactccaggacgaagtggtccacggtgccgtcgtcggcctcggattgcatgcggtagagggtgttcatggtggccatctcggcgacctcgctaccgacgccgttgagctgccggtattcctcggtcagcaactgactaacgttgcttacgaggttctaagccgcgttctccatgcttcgatctctctagcttggttggctggaagctagtttggcggccgtggcggagatgcggacggtggccggaggcggcggcgaggcggggccgtggcagagaggcaggcggcggggcgcgccaacccagctccggccacgggcgccgctgtccgcgccgactaccaccggagccgaccgagctcgtcgacccgccgccgcctcccaccacccgcccccgagcggcgccgtgcgcaccgaccgccctgagcccgacagcgcgcgagagagggggagagagaaacatgagatagataaagtatatatatgacaggtgggccccaaaataaaatgctgactgaattgccacgtgtacgccacgtagaccaaaaccaccgcggattgggttgaggggggtaatttgtctggtttgcatagttgggggtgaagaatatctggttttgtagtttagggagtaattcggacgaccgcgatagttcaggggggtaattcgtactttttccttatttgtataactgtgtatccagatttatagccaaaagttattatatttaggacgaatgtagtagtttttagcataaaacttttatactactacttttagcctccaaaagccaaaactgaaaatagaaagcgacgaaaaagcctccatgtcaatctaaaattaggttctgaaatgcaaaggccgcaattcaaataagccaacatagattacctgcatatgccagattgttaggaattgcgcaccgacattaaaattgttattcttatgttaggggggccacaattgtctgcttgaaattgtaagaataccaaagataaaaatttgagattatgtttaagctcaaattaaacaagcaggtaagccacgctgtaaaatcaaagatataacaactagtatatccaaaaggactcgtacttgatcaactttccctatcaagcccactttttagtcacaatgcacataaaacacatatacccaagagaagagagtgaatgacacaaaaaattcctcccaacagggatctttctttccttactaacctgatctggcattatcaaatctcattacttgcaagcaactcacccagcaaacagtgacaactgacaactcgttgatccattccagttctgaaaccggagagaattgtaccaacagggatctttcttttctcactttcaggcttcaaccaccagccgctaattgcaatggattctttgttctgccatccccccacaaagccctactttatggaaaagaaatgagggaacaagtgcctatcttgcataggatatgtatttaattgcaggattagtattaatcaattagtaggtgagaacatgaggtgatagatgtaagtagatagatggtgtgtgtctgtgtagagatagggtggcttaattagaaaaggccaggtaggggatggttgttggtttgtcactttgttcagtgccacagctaagaccccacattattttgcactctctctgattggatggattaagtggttgggatcataaatggattgtgccactaatagtatcaaggggattaattctagcaagttgattagtatatgccatcagaaggtgattgtgtgctttctgtattcttgttcaagtatgttatggttttctgtttcttgtccaagccaagatctggtgattgtgtgctccctttttttcctcttcttgatcagatgacacatcatttgtgtatgttaaagaggaaaaatcatttatgtgtgatctggccttttgattaaggaatcatctttgatttctggatgattatggtacatattacttattttaggtgtcagtaagttttccagtatttcctaattttaatatttgttagagcaattttagacaggccttttgtctatcatcttagcaaccatgaaaataaagctggataacgaaagtgacccccaaaaaaaaaaccctatattaacctagaaccaaattctaaaattcaaaatcatccaaagctgtgggaaagctccgaaccgtccttcccatgtactcctacataacatggttggcatgtcatgctcttgatattgtcatcatggtgttcatcaaaacaaacatgattcttgttgagtttcccgtcactgtcagagaaatatatatatagacatacctgcaaataataataagaaaaagaaaaaagatcgttttcgccattggcaaatgcataaattaatcgaactgttggagatttatggatgaaattgattgaaggtgacaatgcatgcgcatagtagcagtactatagctgcttatctgtttcaacagctccgaatctgtcaacacgaaaaggaggcgtaaaattaaacgccctagagcctggaccatgcatcctttagcttagaacaacaacggaatcgtgtacgagttccacgagaaatttaagcatcatctccgatccatttcactagctagcaatttttttttcaaaaaaaaaaactcctcttacgtttccaacatgccaagccctgttagcacaaaaggcatgcaacaattacctagcttgaaaagtagaatacaaagtagattagtgaaaaaagcaaagcagtttagaaattgttgcatgagcggaaacaaaaaaaatattaataaactgaatgcaacaaacaataacagagctaacacgtactcgagaaataaccgctagtccctttcatatgttaactttgccaataatgcccttccttacagaagggaacatatcctattcacacaaacttccgtgcacaccaactagcaaatatcaggaaaaattctacacatactctaaatagtattacacttacatgtgaaattttattttcaaatttattatattttagccgtaataaaaaagataaaattttaacagatttttacccttaaaaagaaatttgaatatgagactttgtagatatgtgtaatacgaatagcagtaaatgtccatttttttatagaatttttcgtgacatttgctagttggtgtacacatagtgtgcacgggaaacttatgtgtataggatatgtttcccttacaaaatagacttaatctattaaataacattttggatttatagtcacactataaaaaatggtttttgctgatacccctttatttttcggagtgtctagtaaaggcccacctataaaaattgaatttcacatgcgagcttcttaagagacccgcatgcgaaaatagatttattttcacatgctgactgcttaagagacctatatgcaaaaaattagacgtttagggttgcaaaggcggtgatagcaactgcttcaagtgctagaagcatagacgcgtcgctttgggcgacaacgacagtacaatcaacaacggtgtccatgtataggaatggtggatccgacgccaaagagcttagaaacgacagggagctcggcgatggcgattccggtgcttaggagctctgtggcggctaatccggctgcgccggcctcgggagggttagatccgccgccgctggcctcaggagctgcggggccttggcggcgacggtgggagcaacacactgcggtgacggcaacgatgatggcggcaacggcgtggatcagagctacctaaggttttaacttttggaattttttaactttttagtaattctttttcgtaggtgggtggattaattgaccgtctgcgagaataagttttctcgcatgagtgtctgattgaaaatttttctatttttatagatatatcgggggaggcgagccgctcagtcgtttgtgaaaatggcttttagccatttgcaaatatcatttctgtagtagtgttgaagtcctagtaaaaaaatgcgataaacaatccatccatctcgtaattctgctaacatgattcctccgatctcacaattctgctaaaatgatttctccgagaaactaccgttcaattgagatgggttttactcggtttttcttcgtagctcagatgcatcggccagtttatccattactcgaaaaagggacttcacgggaatgcgcattttttcaggtccattttatggtttcccttggaaaacttgtactagtaattaagtgatcatggcttcttacatacgagtacgcagtgaccatatatttttaaaaaatagtataatttacggtggtctttttacttgtaatattctttaacaaatatattaagagatgtgcttctatacttctaaaaaaaaggttgcacgaaaatcaaaacacataggtggctgagattaaaagagagattaacactctaatcctcattagcgaggggtattttcatccatggaattttgagccccggtccaactctgcagcgataccaaattaccaatggggacaccgattcctccacgactacgaccgctagtccgggatgctctctccttgggtagcgccgctcctcagcctcgcaagcaccgcccgcgcttcccttgcctcgccacctcccctccctcttcctcccctcgttgcccggcttcctcttgcaaacagcgccgccgctccgccctcttcttcctctcgacgcacggtgcagcacgacgctccattttgtccatctcacagccagtagtcataaaacaagtatctgcatgccattatgtctaccccgttcatttacagctcaccaccatctcaagtcacatcgaacttgccgttgcagattgcagacagacaaatatcaaacaagccaaagcacgaagggcataagcttattttgtgttatttcttctgtttaaactttggttcaatcgaattgcgacctggccttaaatgaggtgtagatcatggcaccggagaagctgctgcagctgtcgctagggtggcctgactactgccggcacagcggcgtgctcaatgtggcagtggtggcggcgcgaggtggtggcccttgatgaggacgtcgacgttgctatatatagtcctcgtgctcgaggctgatcatgttgagcatggcggcgacgatcttcattgtggggcagcatattattcactggagctcccgctcatcgtgttgcgagtgaactaccgactcaaatcaccgcaaatccatcgatccatcgatgggatctagttagggtggtctagcagggcagggaggggaagcgggtggtgcttacgttgcagaggaaaccagcgggcagtggcgctgcctgacgaggagagaacgatatcgttgtgggctgaaatttctatggatgaaaatacccctcactaatgaggattaaactgttaacccacttttaatcacagccactgatgtgcttcgattttcatgcaacttttttttaagaagtatagaagcacatctcatatattaattatcactattaaatgatcacaatcgatgatgtatagtaagttttaccgctagtagaaaatttattttactaagtagtataaatagatatgacgtattaaattagaaaagataaaaaagcatactgtaaattgatttctcctttagtagaaatcattataaaacaatattgaaaggaacttaccccctgcttgcttgggatcgcccagaaaacggataggacgaaaacacgctgtagagtctcgcgcgatcggagacaagatcaacggatcgaaagcaaggtctccgctgaaatccacagatcaaagaaaaaccttggctacatcgatcctccatgcatttggatcactatagtaacgtctgtgtactgttgtcctggaccacgccttcatgcgcatatgaatggatcagcgagatactccttccgttcataaaataaaataaaaataaacttacttccaaatataaggatgtgttcttcccctcttttcctaactcacctctctcgttttcggtgcgtatgttttccaaactattcaacctctctcgttttcggtgcgtacgttttccaaactattcaacgatgtgttttttatatatattttctaaaaaaattgctttaaaaatcatattaatttatttttaaagtttattttagttaatcatacgctaatgtgtgttttgttttacatgttggagaggaagggttccaaccttttacgacctaaggctttgtttggcaaatgggatagggaaattatatcccaccctctaaggctgtgttcggaggtgggtgttgggaacccatctcccatgcacggaaaacggagcggtctattagcgcgtgattaattaagtattagcttttttcaaaaatagatcaatataattttttaagcaagtttcgtatagaaacttttttaaaaaaaagcaccgtttagtagtttgaaaagcgtgcacgcggaaaaccgtaggagagagagttgggaaaacagagtacctatcatagccatccatttttcatatctcatttaatcatagccattcattcattcatttccctttcctattttcacctctcataatctatatctagaagtgggttttctctaaaagaggaggagtatgtgcgtagtatgcttccaacgacggcaaacgcgtgcagcacatgaagaagaagaagagcaaaacgtctactatatctgtgagagagggcggcagggggcgctaggtagctttggattactccgcacgaaatgctatgcttgcaggcaagtccaaaaccaactggatttggttcttccccctctacgtatgtacgggtgtatcatggtgtggaatgtgatggagtactttctctagtcaagaattttttttatttttcttaatatcccctccaactggatggcactcgaggatatatttggctgtgttattatcacagttttcccaatccatctctctcgttttccgcgtgcacgctttttaaactactaaacgttgtgtttttttaaaaaaaaattctatacaaaagttgtttaaaaaacatattaatctatctttcaaaaaaagagctaatacttaattaatcatgcgttaatggattactccgttttctgtaccgatgggagtgctcccaaccagaaggtgcgaacacacccaaatatatatcctaatatgtagtactccctcaaaaatcaccccccacaaagtttttacgaatcacttcctttctctcgtggaccaaacaaagattttatataaacttaccccgaaaacaaaatgattattgatctaaaccgtttttcaaaaaggcatattcaaacttatttaatttcctagctgaaattcggttatattttcgtcgtccaaacaactacagaaggctggcgtgttcgtttcggtgcagaaccagatccatgcatgtctggtatctcctttaccaaagttttagtactaattaatacatacatttcttgtattaatatattgcagtggccaaagtttgtcacttattaattcccttattaaaagaatatttcacatgattaccatttcgtaactgcccagcttgatcgagctacctattgattgtttttaattgttgtcccaggttcccggtaaaagtaaattatccaaggctcagttacctgcttaagacgatatcttccatttaatcaaggatctcagagtagggagagaaagaaggagagcaaaggtcatgtcatgccaaaagcatttcactttcacgcaaatgctgcttgttcatggaaagaaatggttgctgctctacctgcaagtaccactacggtttatttatatttacgtagcaagtttaaacgcgctgttgcgatgtatgatttctttttagaggtattatgatagtgatttcttgaaaagaaaaaaaacgaaaggagcttctggtagggattaggctctgtgttcgtttggggttgagaaccattcctcaatacataaaacaaagagttgaataattaattaagtattagctaaaagtttttaaaaaataattaatataatttttaagcaactttttggtagaactttttttaaaaaaattataccttttaaccgaacgggaaatgtgtataaagaaaacgagcaaatagaaattgggaaagtatagtatagaatacaaccttatacggctatgtaaactttcacgttatttctaggtgactatatgtctttatttaatataggactattgcatgattacccgtgttaaaagtgtattagcaagtacctgagattaaaagggggaagcaagcttatttagggtttttttctaaatagctaaatggctgaatagcgaagcaatcttgtgatatcgttttgagcgcacaaacgaattaacttactataaagttgaaaagtttttttttcaaaaatcatatgcaaaaagttttttgaaaattgcacaattaagaagcctgaaaaacgtgtcattgaattattaaggaaaaagtcaatatataaccttaaactttacacagaattttatttagcacctaacttcaaaaccggatcggacattcaacctgatgtaaaaccattcatattatctctaaagtagttttggatagttgttttacatatttcgaagcttcaacaagggttttgaatactccccccgtccttaaaaggaatgtagtaacgtttttgccttaaaaatttgtctatagaagggtgtagttttagagtgattcactacgcttctttaatagtgctcgaccatttcttatcatttgtaaccattgaaccaatagtactcgttcctccttgttttctcccattcttgttttctctccgtattaactccttgttttctcccattcttgttttctctccgtattaataaagggcatagaagtctttttaatctcttggttactatgtatttgattagttaaaactatattatattttttttgggctgagggagtaactaatataacataaaattgtcaacttccgtcctcaatttatacaatatagtaatgccaagtatgtgtttgcactcatttgtgggtgagagaaaaagaggtaaagatgaaatatttaagtagagattttaacatgtaccccaatgtgtatatcacatagtcaagtccattcaatatgtatgcaaatttgataaaaacaaaaatcatcttactataagtgtaaagtttggaggttgaatcttgggttttaaagtttagggcccctttaaaacataggaattttggagcatttcaatcctatagaaaaaattcctatgaatgcatttgaatcaaaggattgaattatatccattcatttgaaattcctatagaatggacaatcctatagagattttggaggaaacttagggccctttgaatcgcaggattgagaaaacgtgggaataggacaaacacggtattttgatataaatgtaagtgtaaaattgttgatatttctgaacgatgttaccaggaatataatcccctgcaatggtgccagaaatattagacgatattcttatggtttacaaatataaattcgcaagtgcacggatataccgttgtattattttacccgaaagtatttccagggtatcgtatttacttaatcccaaggaaagttatggtcagagagtactatgctataaattcatatcacacttatgcaaatcaaagtctaatgcagggtttaatcaagtcaaggtaaggataggttgacacatagaaggaacagtttagaatactcttactaattaataagtctaggcttagtgaagaagaaataagaaaagcatcgtttctatacttctagtatatcgtcattttagtatacgcttgctaatatacaactatgtggctaatacctcctaactatacccttctggtatatcgaaaaaccacccctaattgctgagttctttatgacaatccgtcatggctatccaaccagttatagatacggaggagtaactgcaccgggaacctttattagacctatatacgtacgtggaggaatacccgtattgagctgtcaccatcagcgtcctacctctacagatctgtggtgactagcaccacttaatgatatctaataatctaggcattgtgcttacattactaaatattactctatgtgtcgacgtttgatgtcgcgattccggtatttgcatagtatggggatcgttggtactaggatatatgcgagattgtagtaaaagagatggagatgaggatttttatataggttcgggcccctgaattatcaggtaataaccctacatcctgttggccgaagccggccgttacttttattcatcataatcacaccagtacaatatttggggtagcctatctaactgttgtcgacatggcggtctgaaggtctgactcgtagtcgacaatagggtagccttttgttagtgatatgccctagaggcaatcatagagatgattgtatcacacactatgtttacatatttatccgactttgttccttgaaatagataaactcattattggttaatgaatatgtgattctttcatgagactctttatgttgtgtgttgctatttctaaaggatccctgatcaaatatcatatgtggaacaaatatgtttagatgatcagcacatgtattaattgatgatcatgtctcatggatcatggtatagagataccaaattaataatgtggacacatattagtgaacatgttgttggatagacccaatatgagacactgcaagagccgtatgtgttgtatcatcagtgatctcatttagtgttggtgttgaatccttagacctgagattatcatggttcccaacatgtgtagtagcttacttagggactgctaaacgctactccgtaattgggtagttataaaagtagttttcaggtatgctatgaaacatgtagtgggatatgaatagtcaagatgggatttgcccctcctatggagagatatctctgggcccctcgatgttgtagattatagaagtgcatggccatgccaaaggtgattgaggagtcaatcacaagttatataatctatcaacaggttcgagtgaatgattgagctattagaggatgacacatatctagccttgagcttaatcgatatcgtgaggcaaaggggttcatacaagtatacactagaggttcagccgatatgatctttatgtatgcccggtgggtcaatacgttctgctaggggccgctgttgacgcgtggaacgaaaaggagtttttgggttacagccgagtatatatgaacctatagggtcgcacgcttaatgggtcggaataaggggattggatggagatccaatataagcttaattcagatagggatccgaataggagtcctacgggccttggaggtccgagtgatggatcctatatattcgtgaggggtgtgaccggcggaggcattgcatcacgtgagaaaccctagccgtcacttccctcctcgagcaaaaccctagctgcgcgcgggtgctagcacatctgcgcgtggcgttccgtccctgtacgtgtgggtaccggtagaggcgctgctggtttgcggtgctgatcggtgtgggagtacggcgaggagaacgcacgaggaggagaaggtcgagccggtgcgatcgactacttcctctacatcgacgcgcgctacttcacgagagttccttcgacttctcagcgtcttcttccgctgcgcagcgcgtcgagtggtaacgatctatgatctaatacttgcatggttcctggtttacgcgatagaaaattttgatttatgctatcgtagcctatgcatatccctacacctttctcctcgaatccgcatccggcgagatctaagacagcgctctatctctcctgacggtatccgtaggcaccgtaggggactagccatgcctatctctgaagtcgatatccgacgtcttgtcttgcgtatgctggcttgtatgttgtggcttctgttattccgtctcccctctcctcctagggtgccttgtatttatacccataggtgtccccttgtccaagtagaattagggaaaccaatatggatacaatccgagtagtccttgccgtttacatgtagaactctggttgtctttccttatccggaactcctcctatatccgaaggttgtttccgtataagacatggtatgtggtgggtcctgccgagatttaatcaactactattaggtatgtggtatccataaccctgacactatgtctctgcagatgatatcgagcaaccacataaatgaacactaagccaatatcattgcatatctctggtaagctagccacacaattcatacgagtgaagtataaactaaagttggtactcgaataattatgcaaataaagtaaaggaccaaaactatataaagaagaatatttcattaatgaataaagtcttataagagagggaagagttactagaaccatactcaaattctccaaaagacttgaagaactaaggaagactattctaattctaactctactagcactagagcaaaatatgtaaactaaagagcttcttcacttgattccttcttggtgtgtctaaaagtaaagtagataaggtccttttatagctgtttatgacagttgggagagccaataccagtagtaaccgttattggaaggcggttaccacctaccttagcttgggcttgggccagcggagctggtgctgggtcgaccgacccctggcaggcctccctagcccagtgattcctccagaatatctttagatggatcctcggcccagtggcatagtggttaggtccatttgcaggtgtttcaatggatttgtgggcctatccatccatatgtacgccacatgttgacctctgattggttgaacgattatgtttcatcatttctactccatttatatagtgatctcctataaacaaatggctttgccaagtacaagtggaactagattatttctaaataaatatgcatgcaagcattactggttctccattatttttggaagtatccacggtcgaaattggtctataacgactgtcaacaaaaacagaggattgcaaagcacaagaaaaacacaagaatggccatttgattggaccgtaggaaaaccacaggaattagagaagagataaagacttaaaaggaaagttttcatgaggtagaacctcatgttagttttcctccaaaacttgtatggcattaggcattccatagtattcatttctttaattcaaagggctatataggaaaaaatcctacaggaattaatcctctaaaattcctatgaatttcctttgaatcaaatggtgtcttagcaagagctcaaaactcttggaatttttttttgagactatctctcttatccgattcatgtgtttttactaagatccaatcaaacggtcattcttgtgttttgcaatactctgttttacacttctattcttattagtattatgtgtttttcttattccttcgtttttttttcattcttgcgatccgaaggggcccaggatgttgcatgaacttccaatcaaattttagggctcctttgatttggaggaaaaacataggaattttggaggattccaatcctataggaaaatttcctatgaaaccctttaaaaatcatatcctatccttttaaattcttatggaatggataatcgtatagagattttggaggaaatatagcaagagctccaacctcttggaaacttttctttgagtctatctctctcatccgattcctacatttttcctgcggttcaatcaaacggtcattcctgtgttttccttgcgttttgcaatcctctattttgtacttgcattactattagaattctccagtaggtggtgtttgaatctcctgaagatgaagatgaagattaaatgattcacacaaaatgatatagtaataacatgtgattagttttaattattacaaactttaaaaatggattaatctgatattttaaaataactttcatatagaaagttttcacacgaaacacatcgtttagcagtttgaaaagcgtgccacgataatccaaaattttatcctctcctagtaggagaaacgaacagggcctacgttttttctatttctctgtttttttcattcctacgattgaaaaggccctaagggtgatatagacattttccttattatattaattatagtacagtaatgcttagttgcacacgctatctgaatgaagcgtacaatactgtgtacgagtttaaagtcggtcggtagcagcgaaaacaccatgcgaataccacttgagtattcaacgcattgcctcacaagtcacgagggtgtagtatttaaaaggagagacagaattttcaaggaaggcatggcatccttttccttgccctttattcgctccctttgtttgtcccaactaactccattctaacacgatataattaagcaagctggatatatcttttttttttccggggaaaacaagctggagttgatgtgcatgtgtccaagaaacgttagggaaatttgcaagtcaagatcaatggtactcttttataaaacgaccttgcggtaacctagcaaatggtcgtatcttatcttattttataattagggattgttttatctgtcaattgtgtagttttgggctaatttctcactcacctttgaactaaaacaagctggggttgtggtggtaaatatatggtggaaatcttaatttgggttaaatttgatgtaaaccctgataaaaagccgtctaaattcactaaaataatcacacgtacgcaagatgatgttacgctaccatgtaatttttttcaaactcaacttcatttgcaagctataaaaacaaaaaaaattgaacgaatcatcatgacaaattgttattttaatatctcataaacggaatcgagagtttgtacatgattttttttacatggtagtttaacatcatcttatctacatgcgtaatctttttaatttagatgacttcttaattatggtttacacgagttttcacatgagttaagtttccaacacatatttgtacagctgttagaacaagaataataatatagccaacttattactattagcccatcttaaaaccaacatataaaattgattagctataaggttggctacaattttcttctcctgtctctatctctcacttatacatttaatgtatttgtcttggagcttgtgataagttagctcttgcatgagagtcaacacccttaatttttcactacctctctcctccacttaagcttatagtaagcttatagctcactattatacttgctcttaggcaccggaagactgcagcttttacattcaggcaacacctaaaactggtagaggtgggcattcggtctgatcgaaaattttggtctcggtcttcggtgtatctgtcatttcggtctttgaaaagtgaagaccaaatttcaacaaaaaatgtcaagaccgacaaattcggtctcggtctcggtcctgactgaaattcagcaacattttcatatatgcaaagaaataatggaaattttcaataaaaaatcacaaaaaaattcgtaagcacgtataaaactcttattaggttgcgtgtctagaagaagtagggatgtgaaaaattagagtttagtcctattgaacttagtggatcgtaggttgcatttagacttttttttaattcggtctattcggttaaccgagaagactaaccgaattgaccgaacaaaattcggtctttcacggcctaggaccgaatttttcggtctcggtcttttccgttcgacccacccctaaaaactggttccaaatagctacaaaattatttgcctttcaatccaacagttggtcaatcggtagtgatggataggcataatcctaagaaatccatgcaagttacagtgtgtgacaccagcaccaaagttgtggatagcagcatctttgatctttattctgataggttcatgtgggggccaaagggcatggacatacaattgccattgccatgcaacacagtcatggacaaaaggagagagataaataaagatgcatttatataattagacgacgcatataataaatagtttcagggtagattgaagggaggcgtcagtctgtcagatatgccttttcctttgttgttaaaaaaagcatagagaaatttaaggctgccccatggaggaggcaatgaaattatgcagcagcctgacacagctagtagattcctgtaccagtttttcatgcataggattgtttttatatgtattactagtagtattttattgtatactaggagtattctttgttgctgcaaaggcttgcatcagaagaaatgagcccttagtttcattgttgatgctcactgcatggtcccccaagggcccagcatgatatgatatgctcagcagtgggtgtatttagtttacgccaaaattggaagtttggttgaaattggaacgatgtgacagaaaagttagaattttatgtgtgtagtaaagttttgatgtgatgaaaaagttagaagtttgaaaaaaaagttgggaactaaactaggcccaagttcatagttcttcttctctcttttttccctctctcttgctgacaaaaaggttccatgctttttttttttacaatccagggtaagggtgtgtttagttctttgggtgtaaaagttttgaaatatatggacacacatttgaagtattaaacatagattaataacaaaacaaattacagattccgcccgtaaactgcgagacgaatttattaagtctaatttatccgtcattagcaaatatttattgtagcatcacattgtcaaatcatggcgtaattaggctcaaaagatttatctcgcaatttacatgcaaactgtgcgattggtttttccccacatttaatgctacatgcatgtgtctaaacatttaatgtgatgtttttggccaaaattttttgggatccaaataaggcctaagaagtattcctactacagtagaatctagttttacaatttttcttttattatctttcacttgtccattcaaagtattcgacgccaaagatgtgcttggtttttgagatgttgtcatgataaccacttggggtgtgtttagttcaagtgtgtttagttctttgggcataaagtttttaaagtatacggacgcacatttgaagtattaaacgtagactaataacaaaacaaattacagaatccgcctgtaaaccgtgagatgaatttattaagcctaattaatccgtcattagcaaatgtttaatgtagcaccacattgttaaatcatggtgcaattaggcttaaaagattcgtctcgcaatttacacgcaatctgtgtaattagttatttttttatatttaatactccatacatgtgtccaaatattcgatgtgatagggtgtaaaattttgccaggggatctaaacaggccctaggactctatgaggggtcacatccccttgtaggttgagttttttttatgaacggatggagtatatatcatctgcctcttctctcctaaaataattttattttatatccatcttgtacataccaataaaaaataaaaagactaaattgttatggaagattactcacttgatgtaatggttgtattaaatttatttagtactagggtaattagactagtggaatatcagggcctgcttggaataattttaatcgcctgaaattgttgcatattgctaatccttgaaattgtaagtttagttcatttttgctgtagtttttctaatgtatatggatctactttatttttaaccaagtttcaatatttgtatctttagtttttacaaatgtttatcaagtataatttattttatgtcattgttcgacctttaattaagaaagaatttaaggttagttcaagcatagtttaagtgcctaacatatgtctagtctaggttagtgcaattcatttttcaacccttttatgtaagaaaaaatggatagtatttaagtagaaaatgaagggagtgtaagggtggttatgttttcattcgaggaaagagaaaactcattaaaatttgatataattccaataacataaagcctagagtccataataaacaaatggtagagatgaactaactcggtcactccaaattacccttgaaatgttcaatatggaactagtgaattgtgatccatccaatcatctctatatctttttctataggcacatgtgcatctcctattggcattagattacattgaggggctatgagggagaagaccaataggagataggcatgtggcgattaggattaggtcccacaatgggtagggactctgttcggcttcgataatggttttgtagggccctagtgcacaaagaaaattcgctcattcaatgaaattgatgaggcatgttaaaaaggatggctagataatttgtggaggcgaactcctattgatattccccatggatttttgctagcatcttcatgttacttgcattgaggtattgataatgattaggcatgtagtacaactgcccttaataagccaccccctcctccaaggctggcccatgggtgacatgaaacaattttttacatcaaaagtgcctaagtttggtccacatgtcaacaactatacacaaataaaatatgctctctatgcattttatcttacccatcgtattctcctctcgtggttctattaccacttagctacccaactctatcatcataccatctcatccacgtactcatacgggctaccacttccctcttctccatcttacgtcccaacaaactacaagagccgatatcatctagcagtggattcgatttcgacagctctaatctattgaaatacaaagcactagcatgtacgttgacatgattttagctgtatttgtcgaaacacaaaagtatatagtacaagctgtattcttcctctatctagatccaatggtcatgattgtcatcattaaatcgttctcctttgcccttgaggtcatcttacaatcttaatatattactccatcgcacttgaggtatcgtggcaatagtccttacaaaatgtgataggagaagacaataatagaaatacacctgcctaggtcatataaactcacgcttggggattgacttggcttaggtttctaggctgtccgcttagaattttttctccttatccttcctttgtcgctattccaaaaaaaagtttggatgatattacatttatagatggatgaagtgggtaccattttgtcttaaggtccaaacattttccatgtctcacatcgacttggatttagcaaacacacaggccatgaaaaaataatgcacatgctgactaacttatctgaactataatggtaccagatacttttgacatcaacaatggttgaatttattattttttgttagtatgaaatcaaaggtggcaaataaaggaacagtgggttgtgctctccctccccctctccaacctaaaggcatggatataaatgagtagagttgggatgttatacttcttttggttctcacaaaagttggatcttgtaggcgcgtggtgtggtttgtagtttttttttcctagtcatggactcctatagctatgattttgtttttttttttttgctatatcaatatgaaatctcgcaccgtcttgtacagttcagtttgaaaaaaaaaataaaggaatagagaactaacatgcatggctttggtggtgaccaatgtggccatggtgctgcatgaacttggaagcatatgcattacagtttttagaaagttggtagaaatcactggtaagcagctcttttactatacttcatgctcattttggaataccttgcagaagtcacaaaacttgtgcaccaagaagtagtagctagtatcagtaatttgtatttgaggtgatcaatgctgcacatatctatctttagctatgactttgacaaaacgtgctccaccaaacatatgttgtctgcctaaaaataaactactagaatttataggactatttccgattaaaatttgtaacttgagcaatttgagggaaataggccagcctacgcattgtttgtataacaatattgttagtgtttgctgcttataatcgcataaaaggctatttttctcattatctaaaattgatcgttttctcgtcgaaccgcctaatgtaatcaatgtgttgaaactgagcaaaagtgaaatcagtatctaagaaaagggcatgatgggcatctatctcaatcggacaaaggcggaggccgaggagggaaagaagaaaggttgtatctccacattcactaaaccaaatatggaactcatgtttgtaattccatacgagatgaaagtctcatgcacagttttgcatgagagaaagaagcgaagaatcctcttttcgacaggagccatgctttcactaaaaacacgaatatttctataaccgttacattaccaacatattagagctagttaacaaaagaagcaggtgcgactacgaactaaacccacatctaactcggttaaacttatgtaactcaaaactcatagtagtgcgcaaaagcataaccatgagccactagctaagggcgtgtttagttcacgccaaaattagaagcttgattgaaattggaacgatgtgacggaaaagttgaaagtttatgtatgtaggaaagttttgatgtgattgaaaagttagaagtatgaagaaaaagtttgcaactaaacaagagctaaaagacacaccatatggtcaaatacatcgctctcagaacgtaattttatcatggtcaaatacaccgttttcagtaatttaatctctgctatagttagcaacataatttattacggcccaacaagaagaaaaaggaaaaaggagagagaaagaagcaacgtttgcatctttttcttagtttgagctgtcggtagtacaaaatccaaggccagcgatcaatcttaaacacaaacataaaaaaaatggtgtactcgccttaattaaacttattttgaaatcaacttgcaaaccccatccaatgaaaacgaattgacaaggcttagtttagattaaccagtaggagtactaccccaaaagtacttaagtatatgggtcaagactagagaaaatcacaaccaatcggagcaaacaagaaattgaaaaggaccttccctgcttactgtcagatggactactttgagaaaaaaagggggcaaaataactatatcaataaattaacctctgtcaaaacaggcaacaattaaaattaagagcagcttagaccattctttctaattttctagttataagatgcacattctacttcagttttcgttagcgcgtttttcaaactgctaaacgatatgttccgtgcgaaaactttctatataagtagcttaaagatatcaaataaatccattattcaattttgtaataatcaaaaactcaattaatcatacgctaatgactttatattcccttactcaatcttcatctatcttaaattgggccatgtctctttttttaattaagatgcagattttacttcggttttcattagcacgatttttaaatcgctaaatggtgtgtttcatacggaggatctacttttgaaaatttttaatgatttaaactcaattatttatatattaatagctctctcattctgcgtgcccttacttaatcctcatcctcattacttacaaacactgcataacggagtaatagtattattattaatgttatgttaatcctgatcctaatccctaatccaaagagaaccatctaaatacccggcgcaagcaaccccctctgctctgtcgtaaccaaaaatttccctctcccctgcgaactcccaccacccaaatttaactcccccaacctcccgcccgtcgcgccagctgacccgtcactgacagggtgggccccacgccccggcgcggtgggtcccacgcgtcagcgaccgtgggtagggtgggcgcgggtgcgccccccccccacccggtcccgtgctccgcggtggcggtcaccgggtgcggggggtgggccgcgtatataggcgggccgccgcgccgcgcgctgctggctaggtgtaggagcttcagctttggcccacatcgcccccctctcgccctcttccttcgctttcgtctcaccgcccccaccgcctcgcctgggggaggggaggggaggggagcccttcgccggagcggccaggttccggcgagcatctagaggaggaggagggggagggcggggaatggggagcggcggccggaagagggggcacgtcgtcgctgctgctgctgctgttgttgttgcgtccctctagggttaggtaggggcgttgctggagtagctttctcccacccccaattttttttgttcgttctctttcgctctcgaggtctctctctctctctctctctccccacctccgccccgccgcgtcggggggttggtcctccttgccggcggcgttcgtcgtcgtcgtcgtcgcattgaggggggagaggtgatccggccgtagtccattccagctcggggaagggggggggcatgggggcagctggtccgcgtggtggtgccgccgctctcgaattcgtgcggggattttggttttgaagagggaggtgacccgcacgcgccgatctggtgaggccttgctcgttttgtgctgttttttgtgcctagctttggtcggaggtgtttgaattgttggggaattttgagcttttgctgtgatctgagcttcaaatttcggtgggggttaacttggcctgggcacctcggaatttctgtttaatttttggtggggtttctttgatcacaagatacttgcttgcttggagctttgggagcccgaggcgcattaaattccacatcttctgcgctgttttatcgggaaattaaacatttcgtgctcaagtctgtgggggggtttttccctcggatttgtcaaatctggcggctcttgttcgaaaattttcatcttgggagcttacgaacgcaaaattcttcacatttcttttgcttcctggcttggaagctgtggaatccaaatttttatgtgctgaattgacatggttagccatgttttttttccacagaaccacatgattttagcaaaatttcgccatttctactttgatccggtggaatctagttgccagatgtgtcgactggtaccttgtctaactagctccatggctatgcgcttgcaggatgccatctcaggtcatggatcagaggcatcacatgtcccagtacagccaccccaccttggctgcatcctccttctcggaggagcttcgtctccccacagaggtactccataattgcgataattttggtccaaatcttccttctggaagtcttttctatgtgatggctaatggtgatctgtctggaaattttatttgtttagcctttcctggtgacctggttatgattcatatctacaaatctttaccaattattctcaccatgtttatatattcattatgatgaatatctataatttgtactaatttttctctcaccatgttcatctcttcttctatctttgcagaggcaagttggattttggaagcaggagtcattacctcatcacatgggttagtgctgagtttgatttaacttatactgggttttgttctacatttgtctattagtatgccttgcggttgcagctttaaattttcacgctgttgggggcatgtacttagtcgtttctttatgcatggatagcaaaactttggggacatctattggctcttttttctgcatgaattacaaaccatctataggagggctttctttgaaaggtttacctggccttgacagccatctagcctgcctaaattgagttaacactaggtgctggccttgccacctgattagtgccttggtgaacattggttttaagtattttcccctctatttatgttagattaatttgcaataaataaataaataaataaataaacatgcatgttcttcttatatatgcaattggttgttgtgttttttcttgttatggttactttctttgttctattgtactactctttgagtctttgataatgtgatggttcataaatatgtgggtttcccatgatattttctcataactaggtgggtttccaatattgacaggaagcaagtctgttgcatcttcaccaattgaaaaacctcaacctattgggacaaggatggctggtcgactagaacttctacaaccatataaactaagagaccagggagctgcatttagccttgagcacaagctattcggtcaagagaggcatgctaacttgccaccatctccttggagacctgatcaagaaactggccgccaaactgattcatctttgaagtcggcagctttattttctgatgggaggattaatccgaatggtgcctataacgagaatgggcttttctcaagctctgtatcagatatttttgacaagaaatgtgagtggtttttctttatcatttgcatttgcttcatcaaaatgcttgattctatgaaacacagactcgagaaatttccattccattgatagtaaatgtgctgaaatataccatcacatgacatatgtattggcaactacaacgcttccttacgatcttacattctatacttaatgcttctcatgaatgaatagaaatgtacaaaagtaaaacaaaaaatacaactgaaatgaaagggtagtaaaatgaaatgactttcattcccttcccctttttccataagaatcttgcctcctttatctcctgtttctttctagtggctaaaagaatcaatccactttagtttggtatcgtagtccgtctgttattcttgtacattcttttgccaaaaaaaagtctgcactctggttcaacctttattctattgtaatatgttatctccaatttccaatcattgaccactgtctgattttatttgtaacctgtgcagtgagattaacatccaagaatggtcttgtcggtcagtcaattgaaaaggttgacctaaaccatgttgatgatgagccctttgagttgaccgaggaaattgaggcccaaataattggaaatcttcttcctgatgatgatgacctgttatcaggtgttgttgatgaagttgggtatccaaccaacgctaacaaccgggatgatgctgatgatgatatattctacactggaggcgggatggaactcgaaactgatgaaaataaaaaactgcaagaatttaatggcagtgctaatgatggaattggtttgttaaatggtgtgttgaatggtgaacatctataccgggaacagccttcgagaactctttttgttcgaaacattaatagtaatgttgaggactctgaattgaagctcctatttgaggttagttacttatttcttcttctttgaatcactcttctgttacaacagatttgacatctgagaagccatctgttcttctatgcagcatttcggagatatccgtgccctttatactgcctgtaaacatcgtggttttgtgatgatatcttactatgatataaggtcagcgctgaatgccaagatggagcttcaaaacaaggcactgaggcgtaggaaacttgacatacattattccattccgaaggtaaccatcaaatcatcaattgccacttaactgaaaatgcttatctgcattttctgttgcctgttcttgtgcttagaatgttattattctagatattcactaaaattgagcacatttgcttttctttccccacaggacaatccttcggagaaagatattaaccagggaactattgtactttttaacgttgacctatctttaacaaatgatgatctacataagatctttggtgactatggtgaaataaaggaggtacgatatttcatttgctgactactattatagctagaaagtatgactcactagttctatttgcagattcgtgacactccacagaagggtcatcacaaaataatagaattttatgatgtcagagcagctgaagctgcacttcgtgcattaaacaggaatgatattgcaggcaagaaaatcaaattggagaccagccgtctgggtgctgctaggcggtaagtcatttgggtcttgtcaacagtgataatactctgtttgctgttttctttttagttcttactactactttcttcatcacttttataacatacatattcaccattttaacatttttgacatactagctgaatgcccatacattgcaatgggaattaattattagagaaccacactgcacactctaaagcctcaaaaattaatataaaactatcctcaatgtaaatcttagggtcatattttttgtcgtcattttcacctccaatttgttttccctgttagacggcttgaggttaggaaagggacaaaagtccacctacctcactgtttgggggactcacatagcagtggtggtgggtggtgggtggtggcagtggtagagtatagagtatatattttgaatgcatagtgtatcttcttttatgtttgagtttcttatccacataatgttcatgctgagctgtgcaggaatagtttagttgaatgcagcatattgaataaacgaaaaaaatgtcaaacatgttggtagaatggcatttctctgagtattttaattgtagctattgctttgactgatttcaatgctctctatcacagcttgtcgcagcatatgtcttcagaattgtgtcaggaagagtttggtgtatgcaaactggggagtccaagcacaagtagccctccaattgcttcgtttggtatgctgttttcctttttcatctcaatgtatgttttgctgataggtgcattttctgacacggatggttatattgcaaggttctactaatttggcaacaataacttcaactggtcatgaaaatggaagtatccagggtatgcattctggacttcagacatcaataagccagttcagagaaacatcttttccaggcctatcttctaccataccacaaagtttgtccactccaattggaatttcatccggtgcaactcatagtaaccaggctgcccttggtgagatcagccaatctctaggtcggatgaatgggcatatgaactatagttttcagggcatgagtgctcttcatcctcattctctgcctgaagtccacaatggagtgaacaatggtgtcccttacaacttaaacagcatggcacaagttgtcaatggaaccaactcgaggacagctgaagctgtggacaacagacatctccataaagtgggttccggcaacctcaatggacattcatttgatcgtgcggaaggaggtaatttgtatatcctaatctcctttgtttgaaaaatctgttatgttaagaggaactgaactatcctaggatatgttggttccatcatgggtcatgccatgattttggtgggatgaattcctcgttttctataattacatgcttttgtgggatgaggtggtgatcgaccaaacacatttcgtttctcaaaccaatgaaagttgtgtaatgtttggatgaaagaaattacatctggatcaatctacaagccttatatgttatctaatcattccttgaatgtgtattttttttttcacttgcagctcttggattttcaagaagtggaagttcttctgtccgtggtcaccagttaatgtggaataattcaagtaacttccatcatcacccaaattctcctgttctatggccaagccctggatcatttgtaaacaatgttccatctcgctcccctgcacaaatgcatggagttccaagagcaccatcgtcgcacatgattgacaatgtgcttcccatgcaccatctccatgtaggatcggcaccagcgatcaacccatcactttgggataggcggcatggctatgcaggggaattgacagaagcaccaaatttccatcctggtagtgtgggaagcatgggatttcctggtagtcctcagcttcactcgatggagcttaataacatataccctcaaactggagggaattgcatggacccaactgtgtctcctgcacagattggtggtccatctcctcagcagagaggttcgatgttccatggaaggaatcctatggttccccttccatcctttgattcacctggtgaacggatgaggagccgaagaaatgattcaaatggtaatcagtctgataataaaaagcaatatgagcttgatgttgaccgcattgttcgtggtgatgactcccggactacgctgatgataaagaatatcccaaacaagtatgtgtaacaactgttaatttaggttcatttttttttcttgcctttgccttcttttctgtcattttcatgtatttctaattgacttgggattccaggtacacctcaaagatgcttctagctgctattgatgaaaatcataaagggacttatgattttatttacctaccaattgacttcaaggtgatctagatttatttagtatgcaactaatacatcatatttgttcagatagtcttgcctaatcgaattactgaatgggatgtgtcctacttttcagaacaagtgcaatgtaggctatgctttcatcaatatgaccaatcctcagcatatcattccattttatcaggtgagagatactatctatagggcctgcccagctgagctggctgcaactgcatcacagccagctgctgcccgaagcagcaatgccagtggcttgctcctgcagccagctcagccaagagaaaccattatcaagtgctagtcgcatgaaggcaatagcttacgttctgcatgcggcttgtcaactttggacattgtacattatccaatttgaaataaatcaatattgtgccctcatcccttttttgcagacgttcaatggcaagaagtgggaaaagtttaacagtgagaaagtggcatcacttgcttatgctagaatccaagggaaatcagctcttattgctcacttccagaactccagtttgatgaatgaggacaagcgctgccgccccatactattccattcggatggtcctaatgcaggagatcaggtatgatctttctctctctctctctctctctctctctctctctctctcgttgataaatggagttaaagcagcagatgacacttggacacagtttgctgttttatggcaagttcttttttgttagcaggccttttctgctgtatttgaatgtattttatcacaaatagacctatattttgtggttgtttctgttctgcagttccaaatttcatgccacattgtgggttccttctcactctcttttttcttttgcatgccatgtcatggtctctttcctatatattacagttgcaagcaccattccttctcatttctttgggaactagaagataatagtatctgttacttattattctctcctaatggcactgagtttgctccataatcactagtcattcttgtttggtctttcagaaccttttatgttagctctgaaaggtttattgttccatgcagattgctattcctttaactatatgattaacaccttttgtccttttgttgtccattaggaaccattccctatgggtacaaacatccgagccaggtcagggagatcgcgagcttcctctggcgaagaaagccaccaggacatctcaatcacctcggttaattgtgacacttctaccaatggagttgatactacagggcctgccaaggactgagtaacacaactgctctggatcactaacccccaaatcccaaatcataacttttgcgacgcggtttccatttcccagttttccgccctttttcccccaactttggtttttttggtatgacccccaatctgtatttattaacttccatgaatgcgggttaccgaagacttggctagattgctgcaacattttgtccctgatggaaacatggatagagagacagagagggtgcttccagtttcccctgaacctaccattatcatattaacctgaaggccgagaaaggtgaaaggcgcagcgagagcttccagattttggtcactttttaagaatgtattaaccccatgttgtatagcagtttccagtaactgtgctgaggggagagagagaaagagaggagagcaaggagacaatttacatgagtttttagtggtggtgtggagaggaagtctttccctgcattttcttttggaaccttttctggcgtcttcatctatgttccattttgagttgaggtctcctcttttaagttgtgtgcagaggagttccgattttgtcttcagggaactttgaccgtatctatcgaccttcatatgtaaatcaacatctctatatagtttgtgtgccctctgttgtatgcctgcggccccttgcaccaaacgaattgtctctctaactcgtgagattgctgtcctcgtttggtcgtattacatctgaatctaagcatttgatgttacgcaaatacatgccaatggctgcattgcgacatgtagcagacggccaatgttcaaacaaaaatcttaacttatgaagtatactagtacctccatcctaaaatataacaatttgggactgatgtgtatatcctagtccaatgaatctggcccttgtctaaattcattggactggatatgtctcatccactttcaaatagctatattttgggacgacactttcaaataactatattttggaacggagggagtaaataattataaatactagtactatcaatttggcacatggtgtcaagtccacttggtgcatggtcatctaggcttccctttggtgcctctcttaagaaccttctaagcgtttaacacaaattaaaatcgaagtaagaatctgacacgaattgaattcgaaatttgctctcacaatgagacaaaaacaaaagaatttggcgaatacagcagtaacgccgtggacgaagacaataataatagtctcggactcgggagttgttcagtcagtgtccgtcactgggggcccgtgggccgagcccgaagaggaggtgaagggtccagcagtggaggcccagctgctggaacgtggcgtcgccccggcgaatctcctccgacgccgcgccggcgaaccgcaccagccggaacgcccgcctcccgccgccggccgccgaaaccgagtggcggtggcagtatcggaagagcgcctccaccggccgtgccgcgccgaactccttctgcaccacccgcccgtcggggaacctgacgcgcacactgcacgcctcctccccctccgtcgcctcgccgtagtccgacgccgcgtcgccgtcttcctcctccaccacgttgctgttgccgagcacggccctgagatacccggcgtcttggaagaagctctccgtgcgcgcagggaccggcattggcgggcggacgacgggcaccggcgggggcggcggtggcggtggcggtggcgtggccgtgagatgcccgtggtcgtcgtcgtcgtcgtcgccgtagagcctctcggtgcgggtcgggatgggcgggcggatggggggctcgtcgtcggcggcggcgaagtagagggcgagggcgtcgtcgaggctgccgcggcatgatctgatgtggttagctgcggcgtctcgactgtcgagcatggtgatgtccatgaaccgcgcgacgaggtcgtccatgtcgcttcccgccatcggtgatggatggatcgttcgatgtcgctggttgatgagttggttttgcagcgcgggcaaagatgaaaagttgacactgacacacacacagagagaaacttgctgatcgtggaagtggcgggcaaggggtgtaggctatttataaggattgaagagccctgatatattgattccgacttggattggaggctgcacgagtgcacggtcttctctccgactccgactcggatttgaggctccgcttcgtcatctaactgttgacgaggacaccagacgaattctgacacgatacagtccgacactatgacatgccctttctggtcttaataatccaataagcttgtattggctgcaagcctctgcaaatgtacctgccttggccttgtgcacgtggttattagctgaaatttaagcaagataggtcatcggaaagtctgtacatgctgtcagaatcttggagaatatttgccattctgtacctagtatcgacttcgaggcttgtgttggaattaatgaatgggccttagtccactcgaagattaattctttgaaaaatcacaaaagcccacctcatgggatgacatgcatatggagtttagtatcaccttgcttattctagaaaagagggacctccttaaaagagaggataccctcctagctacttgaagcatgtgtggtggagagaagagagagaacacacacgcagatgcagcctccttttgcagttttgttttgttgcaaaattcggattcgtttttgttttggaaacgttccgaaaaatccggtgcgtgcaaacggcgtggagtccggataagttacgcgcgacttatccggttcggttacgcgtagtggagatcgtgcgggcgccctgatcaagcgacccttctctatataaaccgagccaccgccttcacgcaacacacgcgaaatcaatctagggtttgcctcctactctgtgccgcgccatcgctcgtaggttactccatcccgctcgccggcgtgtacctgcgatcgggagagcaggtctccggaacctctgccttcgatgtcctgcaccgggagaaggcggtaataaggtttttaggaagcgctttgcacgactgctccctgttcgtccgcgacggctcgtcttcctcttcgctcgcgtgctgcgtgccttcatagacgcctgcgaaaagtttcgaccgagcagccggtctttccgccacctcggtacgtgttcaatatgttgcgcatgtttgatctgttcatgttatactgtgtagtttacatgtgcagatctaatgatgcgttcatgctagtttttatctgtaatgtcatgatttatttatggaatagattaaatcattatatgcctataatctcaactgcttgtatgtcatatcaccaaaccatttcaagatgagaaaattgacatttagccattctcggattagggtttcgccagaatgccatccccggatgtggtttcgttataatgccatcttcaaacgcccccatcctgccacactgccattttagccaatttcagttatttgcaaatatttttcattgttttgcttatttggtttgaccaaaatgcccttgctttagccactccacgcaccggccaagatccttccaccgtggggcccactcgccaggagcgtcttccacctccgcccgccaccatccttctccctccggtgaactcatgcaacaatgccctctcttgatctccctcctcggttgctctcgccccaaattgaatgcaaaaatcagttcctctcgtcctcctcatcaattccccccacaaatcccactcaaatcggcttaattctgttgtggattttgaagtccctcttcaatggcgagctccgccatggctggcgagatcgatagccatactagtgctgctgctgccgcccaaaccgcaagatgcgcggcggccgtccatcaatcatgatgaggagctccatcatgttctcgttgggtggtgggcaggtggcctgcaccaggaacatgtcacaaccacgcacgcttcccccgtccgtgaaccgcttgatcttcaccctacccagctccatgcccagatagaacgccacctcctgcgccagcgtcgggttcgccgtgccggagaagatgcgcagccgactgctagagctcggctgcgatagcgctgggaccgggagcacgtccgagctatgcttgccgtccggctgcgactactagaggaagaagacgactggatggagatcgatctgtccctcccatgcaagtcaacgaaatagccataggggcaaaaaagtcagatcatagtggataacatttgcaaataactgaaattggatgaatggcaatatggcaagatggtgacgtttgaagatggcattataacgaagccacattcggggatggcattctagcgaaaccccaacccgaggatggctaaatgtcaattttctctttcaagatttgttgacaacggtgtcgacacgtcggattaaggaacatcgctgatgaattacaataaggctgtgtttagatccaaagtttggatccaaacttcagtccttttccatcacatcaacgtgtcatacacacacaacttttcagtcacatcatctccaatttcaaccaaaatccaaactttgcgctgaactaaacacaacctaactttaatttttcttgagaactcccgagttgaaggaggtgatgcagagcatccaaggctaaaatgagtttcctgacactcttggatcagggtgtgtccaactttatggaaataaactcaggcatgtcccatccttcccattttttttttagaaaattcgctggggggagagcttccccacctgaattcattaaaaagggagcaaagggcagttttacaaagtctagagcattacatattgagagagtggagggaggaagaaaagagatctttccaggtcgaaattacatgtctcctctactttgattctttccccccagagggaggcatcctcgatacactgctctagtaaacggcgcaaagaaggagcctcgtgtcagaagacaaccccgtggcggtgattccacatgttccaaaagcatagcaagtagaacaccctaaagtgcttcaagggaacttgaggcaatctcaacaagcatcgcaacattgaccggtatattcatcgcgctccagaaggtcacagcgaaggggcactggaagcataggtggagggctgtttcatcagcagagttgcaaagttcacaggtcggagccggtactatggttttcttgtgcaagttgcgttttattgggaaacgatctttagtcaagagccaggcaaagaactgaactttcataggagctttattctcccacacaaatttccagttggggcacttctccatctcgtcgtatcctgcaagataaagatccctagtttttaggattctatggggaaaaatatatagtgcaaaccatatatgtggtggaaacttggaaactaccgttggatcaagaaatggacgtccgagattcggccacgtcatcatgagttaaaatttaactcacagattcactcatgagttaaaattttacagggagttaaattttaactcatggtgacgtggacgaatctcggacgtccatttctcgatccaacggtagtttccaagtttccactacatatgtggtttgcactacatattttcccatcaagatgatgagtcactaggcactgcatcaagaggctgctgagatggttggattgatcttccgccgctgtggagagcctgggggcaaagtgggttctgaggtcgtcagcaaggacctgcgccactgaggcatttttttcaagcgagtgagtatacagaggcctgaacttgtcagccagcacatcgccacaccagtggtcatgccaaaatgaggttcgttgatcatctccaacctgaacgtactgaggtgtgtttctgaagaattggcagcagggacatcatggagtcccaatgcgttccaagcatgttaattatgagcagctaagttcgagtttagatgttccccccatatccaggaagcccaggaagagtgatcagcgtggaggtggtgtaatctcttactaggagagctgtattttgcttttcgatgtttttgacccccagcccgcctacgttcttaggcatgcagacagaatcccaagccactaaacatccttcccagtttagtgtaaccagcctgtttatcctttgcacgcagcccaatatatatatgttgttacaatggtaaaaaagagcttaagctcttctcattgtgacaagtgaggataacatttgctatctgaatcaggtgacaacatgataacactgcggtgaagcacaagaaacccctgcaagttttatctcctattttatattgcaatgcaaaatccagccagatggggtgccgtgcaagacaattcccaactctcacaagccacaattaagccagctgatggccaactgacaacagcaacactatgggtaagcaagattcttatcacggaaaacagtaaaaaccttaccacttcctatactatctgccaatgccaataatcaaaacccatatagagtgcaataattaagttcaaaattaactcataaggcactcaagccggcagggaaaaaatcacacttcaagggaaaagatgcacagaaatcaactccgcacatagcaatcaaccagaaatgagaactgcaataacgtggattcatctcatcacatttatctacacatcaaaaccctgtagggggcaaagccatgtcaaagatcgatcgagctacttaagagaacaaaatcttttgcgtcaaaaagagaacaaaatcaggaaggatcaatgttaatgttccttctcctcacaggacaacagaagatggcctatatgaatacctttgaaacaaaggattaaatcatatcatatttttagaaatttctatgaaatggacaattctatagagattttggaggaattttagcaagagttttaacttcttggaaatttttctttgaatctatctcatctgattcctgcgattttcctacgattcaatcaaacggtcattcatgtgtttcataatcatctgttttgcacttgcattcctattagaatcttgtttttttccctattactcagtttttctattcatgcgatttaaagaggcccttaatgtctatttgcttatgaaatattgacaatgttaaacaaaatgatcaccaagaagtgtttcctttttgtgatgtttttgttttccctcctgatctatggtttgaatggacatactcaaccttccgcataacattttactctatatattttacatgcacatcttgaattattgatcatattgatactacatactatcaaaccgaacattaaaattacactttaatgtatttgtcccatacatcagtgttctaggagttatccatagccacactgataaggcattagacgtcgcatttggcagctaatcttgctttgagggctcttgtgctacaacactgctttctaccagtataaaaggcaagtgatatgcatgtcatgcagtagagcggagctggcacaccttacttaccttgccaaacgatatacagttggcaggtgtgtgtttatggagtttgcatctgagcacatcttatgattgattttagcagaagtgcagaactgatttatcagtttctcgcaccaaaactgacatacgtttcctttgctataggttgatattcgttagccaaccgacatgaaaccagaaaataggaccaattgagagaaacttggagacaggggcggaaccagcccaaaatgacgatggggtcactatagaatccttagtcttaacacagacatatatgttgtattaaattaacaatgtatatataatataatgataaatgttgacaacaaggtattgcaaaaataaattatctttcgagaagtgtgattacctctcaatctctcatactttccctttacgatcttccattttctggaaaggagcaatcacttcatcaacaagaattgtagctagaaagtctttctcaacgaagcacacaatataatcattcataaattggtcgccgatgcgattacgtggtgttgtcttcacagttttcatagctggaaagcacctctctactgatgcaggaggacaagtactaacttgaggaggtgatagaccaaaggaaaattccacttcaaaaaatagaccaaaggaaaagcaagatgttttttttgtctcaaccatcagcttagcaagttcagaaatagtgtttacattgccaaatctttcatctgctcgcatattatcaatgtaaatatgaagctatccttcagttgcaatgaagtaaaatcatccggataggacttagccaactcgattaaactatcaaatctgaatgcctcaaaataatctttgggactaaaagcagccatctgggttgaaaacttgaaattgtgctgaaaagatcacaacttagaagctgtatagacacgtttaaaaatatcacaacttagacacgtttaacaagacatgatatccatgattattaaatgtatagacacgtttaaaaagattgtttctatggttagcatcaccatgcttatttgttaacactttcaattccagagtaccacgtccgtttcatgagacaatatgcaaacaatattccgagaataaaaactctggattaatcgacaatctgattatcgatcaggacatggagaacaagaaaggattgttaactggctggcacaaccaaaagttgtatgcagcctgaaggggttaggccatgaacaatgaggggcactcccctaagtgccatgtaagcccaagtcccatgctacactagccacaatgcaaagtggtctcaaatggccccagtaaatctaaaggcacgtgttgaagtcactcaaggccatagtggctttgactcaacccaagttgttccatctataaaatttcatctttatcgttgcttattcacaacccacaaccctcctttcatcagctattaagaagaactaggaagattgcccgcgcattcacgcgagcatgtgtcgtagactatgtttgaacatctacaatatatgatttctccataaattgttttcattagcattgctttataattttctaacctagctattagttatttttataacatgtcatatttaattaatccctacaagcaattatttataatattcttcatcatctaaaaagtaggttgacatattttgtgttagaaaacatgtatagcaaattaagtgtaaattcaaaagtaaggtgtttttttaattgaatgtaggttgtcattgtttgttgacggatgaattgggtgggatatgaggctccactaaatgcatgggtttatatagtctaatattattgtttagtttgagagagaatccatatgtgaacattctatgtagagtgtgggtgagactccatgcaacttagcgtgaataatattggatgaagaaatatagttgtgcaatatattattttggaagatgatgtattatgaatacacacttgtcttttaatatgagataaatctaatggctagaaataatgggttcatcagtttaaaaacgcctaggaggatttatggggtaacatgtggagactttatataaaaaagaaaccatcatcgattagatgatatataaaataaaattataagtgtagcttaaaattatggtctttttaatatttgtttctctctttagtttagtagctgaaaatagggaggagactggagaaaaacgaatagcatagaactcgaatcaggtataagaaagggttcgcagtgtaatagtgttatgtgcatgtgattggagagggaggtggagggtacattatttttttttcaatctttgtaaacaatctaagtgagaacctatgatttgttgttttctcattctaaggatctttaagacaagacatgtggtggcttaagtttttttataaagagaaaggtgatctaatagttaaaaataatgggtcatcaaattaagtggaaaccaatgtatagatatatactccctccatccacacatattacttttgtcaccaaaaccaagaaaatattaaatcatcttggatgttataaaatcaaggagtaaatgcaagcatgcaagtatgcaaccaatgaatatttagatgactcctccggttctaatcaaacatttaatttatctcttcatttaagtcttaaatacataaagactataaataggaacaacttatttggaaaaactcaaatgtgaaatatgtctaacttttgtggatggagggagtactttatttttttctttgaatttcaattttttcaaagttttaaaatatcatacgtggtgacttaagagtgctgtagagcacgtttaattgatctttactatgtaaaatgattcaagaatatctaatatgcgttgtcatgttttttaatgttttgttgttatttggtaaggagattttttttattgaggtagatttaatgcgttcatctgtttgaattatttatgtctttaaatccaatttttaaaattataactccactgatttaaatgaaaattgatgaaattataagtccaccaatttaattgaaaattgatggttagatttgttttcttcataatattttttataattaaattttttatttataaaaaaggaaggtgagagaaagaattattgaagacggagaaagtgtatatatatatacttacatgcgtggggtggtcggaagggtgggccagtggggagaggagagttatgccggtgggagacaggcgatggatgtggattgtggttttttttaagaaaaaaaagataaatctaatagtcgaaaattgatggtttaccgatttattataattccacgtgcggtttagtagtgtttataggcgtaccacgtggtagtataggagtgtttgtatacctttagtatataattttttttaattttaaaatggtaattaggatgacatgccctagaaattattcttttccatagaagtttaccacggttgaatcattaagtattttaaagacaccatggatctaaatttaaatgtgttcgcaaatttgatgattaagataaatctagtagagcttagcaggatgaaaacacgtgcacaccctcatttgtagcagacctaatgctaactgcattgataatccctagcaagaataggttagtctatttggataaccacattaaagcaagcagcacgcacgttgaaaacatattcaatgttttgatttctctgcatctttgtggtttattatactccctccattccaaaatgtttgacgccgttgactttttttagtcatctttgaccgttcgtcttattcaaaaaaatttaagtaattattaattcttttcctatcatttgaattatatgtatatatatagttttacatattttataaaattttttgaataagacgaacggtcaaacatgtttaaaaaagtcaacgtgtcgaatatttagaaacagagtgagtataatttagtaacttaagattttatatggggttgctagcaataaagtaggaaattcaggtacttaccacagagggaggagtacgtatgtatagagagaggagatttcttttttattggaaacagatccttgagatatatcactactggagaagaggtctttagagggtcggccgatttccacaatagtcccggttccaaaacgaaccgggactaaagtggcttattagtcccggtttattacttcaacgggacgataccaaccgggactaaagacggttcgtctcctgacagggcatgtcagacctctgtcggggggcttgggatctttagtcccggttcgtgttaccaaccgggactaaagatcatatctttagtcccggttggtaatacaaaccgggactaaagtgatttgagatctttatgccgggttggtgttaccaaccgggactaaagttgcacagctttatataccccttcttcctcctctagcccgagccattgcttcaaaattaagctttgagggagggagttgctgtcaaaattttaagtaaatttttttggtggtaatatacaaatttgaggtcttcaaaaggttagtaacttcatcctactctttgttttgcttagcatctacatttggagctattttttttacatatttttccctctaaaaaatgtgatggaagctgatgagagagaaagtgtgtgtagggaataaagaagattataaatacttgtttgaataattacatataattttgtatgaaattataaaactaagctaatttaatattaaaataagaaaaacatattaaatatttgtttataatgtaattaaaacatgaaaaatatgtacaatgaatttaataataatgattaattgtatgaataattatattcaattattgtattattatgtaattaccttgtaaatcttggattttgtataattatgatttatatgtatttcatatagatggatcggcaatggatgtacgcggatcggcggtcgaaagagtttattgacggcgtgcattattttttgggtgtggccaatgataacaagcgtaacggttttataagctgtccatgcgacaagtgcaaaaaccagaaggagtattccaccccacgaactattcatgcccacctgtttcagtgggggttcatgcgtagctacaattgttggacctcgcacagagaggttggggttgcaatggaagaagatgaagtagaagatgagaacattccggactgggctcagtatggcggatttgaagaaaacacaatgggcgaggcggagctggatgttgaagggaatgacggtgctgatgaacttggtcaaatattgcgggacttacaggaggactgcgaaagtgaaaaggaggtgcagaaactgaagcgcatgttagcggaccacagaacagcgttgtacccaggttgcgagaagggctacaaaaagttgagtaccatcctagaattcttgcaatggaaggttaaaaatggtgtgagtgacaaggcattcggcgagttattgaaactcgtaaagaacattcttccggaggggaacgaattgcccgaaagtacatacgaagctaagaagacagtctgccctctaggtctagaagtacagaagatttacgcgtgtccgaacgactatatcctgtatcgcggtgagtacgaaaacctagaagcatgccctgtttgcaaagcactacgatacaagataagacgagatgatccaggtgaagttgacggacaacctttgaagaagagaattcctgctaaggtgatgtggtattttcctataataccaaggctgaagcggtttttcaggaacaaatcacaagctagaatgatacggtggcacgcagaagaacgtaaacaggatgggatgctgagacaccccgctgacgggtcgcagtggcgaaatatcgacagaacatttaaagacttcggcgaggatgcacaaaacatgaggtttggtttaagcactgatggaatgaatccgtttggagagatgagcagtggccatagcacctggccagtcaccatgtgcatctacaatcttcccccttggctatgcatgaagcggaagtacatcatgatgccgattattattcaaggcccgaagcaacctggtaacgacattgatgtgtacctaagaccattggttgaagatctgaaagtgctgtggaggaaagagggcgtccccgtgtgggatgaggacaagcaggagcaatttaacctacgagcgttgctattcgttacaattaacgattggcctgcacttagtaacctatccagacaatcaaacaaggggtacaacgcttgcactcactgtttggatgaaactgaaagtacttatctgaagcattgcaggaaggttgtgtacatgggccatcgtcgactccttgctgcaaaccaccctgtacggaaaaaaggcaagcacttcgaacagaaggcataccatcgtactaagcctaaacatcgcaacgggaaagcagtgttcgaaatggtgaaggatctgaaagtagtatttggaaaggggcctggcagccaacctatagagagcgaagatggtcacgcggcgatgtggaagaaaaactctattttttgggagctaccctattgggaggtcttggacgttcgccacgcaatcgacgtaatgcacctcactaagaacctttgcgtaaacctgctaggcttcttaggtgtatatgggaagtccaaagatacactcgaagcacgcaatgatctcaagcatatggaacaacgcgagggctttcatccggaaccgaacgagaaaggaagccattacttaagtccggcgagctacaccctaagcaaggaagagaaggagagtatgtttcaatgcctagagagcatcaaggtaccgtccgaatactcctcgaatgtaaagagaataataagcacgaaggataagaagttacaaaacctaaagtctcatgactgtcacgtgcttatgacacagctgcttcctgttataattcgtggtatccttcctgataatgtgcgggtaacaataacgaagctttgtgctttcatgaacgcaatttcacagaaagtcattgatccagaaagtttagccgcccttcagcatgacgtggtgcaatgccttgtcagctttgagttgatctttccaccatcattcttcaatataatgacacatcttctgtgccaccttgtaaaagagatcggtattctcggtcctgtgtacctacacaacatgtttcctttcgagaggtacatgggcgttctaaagaagtacgttcgtaaccgttctcgtccggaagcaagcatcgcgaaggggtatggaacagaggaggtcattgagttctgcgtagattttattgaagacctcgagccaatcggggtacccgaatcaatccatgaggggagactacggggaaagggcacacttggaaggagagcaattatgactgtagacaacgatttattccgtaaaggacatttcacggttttgcaacaatcttcgttggttgctccttacattgatgagcaccttgcgattgttcgctcagaaaacagtggcaagtccgatgcctggattacacgccatcatattgatactttccccgcttggctgcgagaacacctcctgggtaacgagacgattgaccgacaactagccttcttggctaggggaccctccggctcggtaactacattccaaggtcatgaaatcaatggatacactttttacacaagagcccaagacaaaaagagcacgaaccagaacagtggtgttcgtatcaatgccataggacacgatggtccaactagcatgtattacggtgtcatcgacaacatttgggaactagagtatggacccctgaaggtccctctgtttcggtgccaatgggttaggctgaccggtggaggcgtaatgattgatgacagcaggatgacagcgagatgacctaaacagggtaggatactcagatgaaccattcgttctagccaatgatgtaacacaagttttttacgtgaagaacatggatagcaaaccaaagaaggggaaagggcccgatgagccaagacgccatgttgttctcccaggcaagaggaaaatcgttggagtcgaggataagactgacgaaaattacgatctgtttgaggggcaacctccgtttgcagtgacggttgacccgagcatcatactatcaaaggaggacacgccatactcatgcaacgatcatagcgaaggaacaatagtgaggagaaagtacgtgaggaagacagtgacctaggttgtttgatggaagatgtaaattatttgtattgtattgaaggtcgaacaatttggatcaatatattattctcaactgcttaatttgtaatgtattactatttttcaaccatatgatatttataaatggttacttccatttatttacactttgaatacaattaattaggcaatatgttatttataactgattattggtatttatttccactttgaaaacaattaagtaggccatatcttaattataaatgataatttctatttatttacactttgaatataattaaattggccttatgttaattataaatgattatttctatttatttatactttgagaccatttacttaggcatatcctgtttatttctatttattaaaattttgaaaacatttaattcggccatacgtaaattacgtacgattttggtatttatttggactttgaaaccatataaatcggccatgtgctaattatattggatttattggtatttatttcgacttgtaagacaatttaaaaaggccataaatcggttttgtgtacacatatttagtcctggtttttaacagtatccgggaccaatacaaattttggaatagcgggaaaacatcttttgtcccggttcgtggcttcaaccgggactaaagatatctttagtcccggttagtagtaacaaccgggagtaaatatttgttctttattcccggttgttactaccaaccgggactaaagatatctttagtcccggttgaagccacgaaccgggacaaaagattaccgggtataaatatccactgcatcggcttccccgcgccacacttagacttctccatgatcgatcttcttcctcccatgccattaccgccccagacgtcgccgtcgcctccgccgtcgtcgtcgtcgtgctcgccatgctcatccgccctcgcgaacgccaccgatagcgttgcctccctcaaggtgaggggcgcaaattttgcgcctccgatctcgcattctctctctctctcgatcgatcttgacacacgccggccgaccggacctcgccgccatcgtcgtcgccgactccaccgccgcgcgctgacaccgccgccgccgcgcgccgactccacctccaccgccgccgcgcgccgccgcgcgccgactccacctacgccgccgccaccgccgcgcgccaactccacctccacctccacctccacctccaccgccgccgccaccttagcgactttcacgaacgacgacttagtgacttagcgactttcacgaacgacgacttagcgactttggcggacaacgacttagcgacttagcgagttagcgacttagcgagaacgacgacttagcgactttgacggacaacgacttagcgactttcacgaacgacgacttagcgactttgacagacaacgacttagcgactttcacgaatgacgacttagcgactttcacgaacgacgacttagcgactttgacggacaacgacttagcgacttagcgacttagcgacttagcgagaacgacgacttagcgacttaacgacttaacgagaacaatgacttagcgaattatacatgtatacttgtagggtttagacgtataagctgtacatgttgatgtccatgacctcactgtctttttttctttgcacgcacagatggcagaccgcgatgacgaacaaatcctgttagacacgatcgcagagggcagcagtcagtactgggtggatgatgaggggaacgaggatcccaaccaatacctgaacgaggagggcaacgatgagggtaaccaggaggctaaccaggaggggaccgaggaggggactaataatcaaccatcggctggacagaagaggccacgcgggaaaagaggtcccgcgaagaagcttgagggaggcacatcgttactgagattgccccagacggtgaaccagtagccccggtgggtataggacgaaagtttgtgaatcattgtggttgggtcttgagagacaacgtccccatcagcatagtgtactggcgtcgaactaggtcacacggggatgaagatagctttctccctgacacagagaaggacatgttgtggaccaccatgctggagacattcacgatccctgaggcagatcgtcccagatgcaaagaatggaccctgaagaaaatggcagaactattccagagctacaaatcagatctgtacaagagatacatcctcaagggcttgacacctgatttcaacgtgcataannnnnnnnnnnnnnnnnnnnnnnnnnnnnnnnnnnnnnnnnnnnnnnnnnnnnnnnnnnnnnnnnnnnnnnnnnnnnnnnnnnnnnnnnnnnnnnnnnnnnnnnnnnnnnnnnnnnnnnnnnnnnnnnnnnnnnnnnnnnnnnnnnnnnnnnnnnnnnnnnnnnnnnnnnnnnnnnnnnnnnnnnnnnnnnnnnnnnnnnnnnnnnnnnnnnnnnnnnnnnnnnnnnnnnnnnnnnnnnnnnnnnnnnnnnnnnnnnnnnnnnnnnnnnnnnnnnnnnnnnnnnnnnnnnnnnnnnnnnnnnnnnnnnnnnnnnnnnnnnnnnnnnnnnnnnnnnnnnnnnnnnnnnnnnnnnnnnnnnnnnnnnnnnnnnnnnnnnnnnnnnnnnnnnnnnnnnnnnnnnnnnnnnnnnnnnnnnnnnnnnnnnnnnnnnnnnnnnnnnnnnnnnnnnnnnnnnnnnnnnnnnnnnnnnnnnnnnnnnnnnnnnnnnnnnnnnnnnnnnnnnnnnnnnnnnnnnnnnnnnnnnnnnnnnnnnnnnnnnnnnnnnnnnnnnnnnnnnnnnnnnnnnnnnnnnnnnnnnnnnnnnnnnnnnnnnnnnnnnnnnnnnnnnnnnnnnnnnnnnnnnnnnnnnnnnnnnnnnnnnnnnnnnnnnnnnnnnnnnnnnnnnnnnnnnnnnnnnnnnnnnnnnnnnnnnnnnnnnnnnnnnnnnnnnnnnnnnnnnnnnnnnnnnnnnnnnnnnnnnnnnnnnnnnnnnnnnnnnnnnnnnnnnnnnnnnnnnnnnnnnnnnnnnnnnnnnnnnnnnnnnnnnnnnnnnnnnnnnnnnnnnnnnnnnnnnnnnnnnnnnnnnnnnnnnnnnnnnnnnnnnnnnnnnnnnnnnnnnnnnnnnnnnnnnnnnnnnnnnnnnnnnnnnnnnnnnnnnnnnnnnnnnnnnnnnnnnnnnnnnnnnnnnnnnnnnnnnnnnnnnnnnnnnnnnnnnnnnnnnnnnnnnnnnnnnnnnnnnnnctccagtgattattccaaaaaaaaaaattagcaacaaatttcagagtatcacaacatgcggtttgttttcagaatacgacaacaagtatccaatctcatcagcaccaccaaacggaagaagaaaatgcttattacatgcatgataaaataattaaaaactctttcaacagtcatacaataatgacatatcattattcatacaataattataaaataatccaacaaacatttcatatttattgtttttaaagttttaaactaatattaatgttgtacttcttttaatttttaatttagtttgttttctattttttaaaattaattttcattatattttaaactatgagaacataacttttttaagtaaacaaacaaaatttctatatattcttcttccccacacaaattttctctctcatcaacttacaacaaagttttggaaacaaaaaaaaatgtgtgaaacatagccagatgtccagctagcaacacaacactacagactcagccagatggaatgcaacttgtaagctcatcaggcacaattaagccgggaggtaaaaatagcacttcatgaaaactctgcacagggcaattgaccagaaatgaaaactcagtaaacagggactcatttgatcacttttatctacatatcaagccatgacaaagaataaggagctcaggatggatcaatgtaaatgttccctctcctcacaagacaacagattatgatgacctacatattcttcacatcaaacctagctgcagcagctgctattactacaacaagctccatcagctcaagactgcttctccttggaaccaccacgtctgcagcggtggaaccagctcgcactcgctgccccttgacttgaactctcggcacgatctgcatctccctggccagcccttctacttgaagtctgaactgcaggaggaggaggatgctggctccttcctcctcctccttgttgttgtcgctcaggctgtagcagattcggaccaatgctagtagtagcaccaggaggcactgggtagaggatgtcttagtgagagtacatgcgaaccagggtcactcggggagttccacgggcaacgcagtacatatcttcgatccccctaaaccgcgggttcgacgctcgggtgatcgactggagttcggcagccatgagatctttcttgcgtccatcaagcgtgtcctccactcggacggccaccccgagtgcgcgcgacagggcgctcatcgtaacgtggtccgcgtgcacacggggaggaataacctgcgtcgagcaccactgcatatgcatccagagcaagaaatcagtcaggtcaagaagcgagtgccaagaatagttgcatatatatatacttgcattgccagtttcaaaacagatactaacatcttccagactgacaccttctccaagccccgttacacgctgtccatacaaccctttgtgcgtgcatatccagatagctgctgctaacctgaggaaagcaaaaactgatacagcaggaatgcatgtcagaatcatgaattaggatgagactgaaggaacgcaggctcaaggtgtttctctcactgtcatctgttgtatcataactgctgaagagctcgaggagaagttctcccctgtcgtagcagaagaaaggtgcatgttcagtcattcagatgggatgggatgtatttagaaacaagccttatgcaggaatttcagaaaaccaaacatttcaaaaacctgattgcggatgttggctgctccgacatgcacttcaatttctttattttctctatcagcgtctcaaatgcctgcaagaatcaatgatacaaaaaaatcattaacatacagatggcatctatcacccaaagagtttaactagcatgttacaatggtgcttacagaatgctgatcatcaataatcggatatgaacaaacatgactagcataacacgtctgagaagcttccatagttaaaacaacaagtgaggaaggcatttctgacttaggatcaggtgcacacaccatgaaggagtatgtgtgcaacagttcagtcttcaatgtaagaaacagatagttatgtttgtcttcattatagtattgtccaactgcaaacttgaaaggttgaatatttgttaccatcaggtaactatactttcaaaaacttataattataactaatatcaacaaggtgttgactacgatgtcgtgccactattgtgaaacaatggtgcatctcctgcaaatgataaaacaaagagagtaagacaatcgatccagcttggtttgtacactacaaattcaagggaatggtccattacacgaatatagggaaggtgagaggttacttcgcatctccgggaaaattcagaggcccattgaagatgttcagcccgggtagccaattttctaacagcatcaagaaggcgatcttcctcacgtgtgtctaccctatcagcaacttgctcctgtcatacattgtcataagcaaagagagttacaacattgaacacatcctatgctagggagtagggaacagggaggagaacacttaccaggtaggaaaacatgaagctcctatagaaaccctccccatctctacgtacaggtcttaattctgaataacgagtgtcaagatgcgccaaatgcaaaggaacatatccatgctggagagcattatgtatgttcccgaaataatgaatgaaggctttgtcaataggaactttctgcacctcacacacaaataagggaatcaaaaaacaatgatctgaaccagaaaacaatataactaaagaaatgtaacttatgtgttatgctccagattttcggttctgtacattctggaaaatgcttgaaagcattaaatgaaataatcgcttaattttattggttggctgttgtttagtcataaaaggaaggatagataaacaagatttcctaatttcagcaaagattacagttccataggtcatcacaatccaatcctctagatggcatgtaaagcataactacaatccagaattaacttatgagttagcatgcatacaagaagagagattctgctgaacaattagctgtacaagaacttgtgagttgtgaatatgcacagtatcctgagatgatctatgatcctgacatttcgtaattcatacacttccatattcaacatttcaaaggttaaaacttaaaaggagtcgaaccttgtgacccacatgaggcggcgatttcgaaattatttccttagaagtttggttggggtagtttggttgttttccttttctatctgaaagctatttacaagagaacaggttaaaatcatgtcttaccagacttggcagcaacttcggagaattaatatgaagataaaaacattttaggctaggatacaatgttgaataaggaatacgagatactccctccgtttcacaatgtaagtcattctagcattttccacattcatattgatgttaatgctagattcattaacatcaatatgaatgtagaaaatgttagaatgacttacattgtgaaacggaggaagtaaatgatattctaaaaaaaaatggaatatatggaactattaaataacatactagtaggactagaaaattagtgcttcaataattttgccaactcttggcaatcatgcaagtcttctgggacaattctaggcagcaactcagccgctgaatcttttagaccaaacattagagtacgctcagcaagtttgcatatacgaaaaaactcatacatctggcttcaggatttcttacgaaaataccatagtagtcataatatggcccaaaatttcatcatatttttacagtaaaggaacttgtgaatatacacgacatcatgtggtataggattctgaatttctaattccgacatttcataatttattcgcccatttccaacattatcaaagacaaaaaagagtcaaatctggtgatacgcatgaagtgacaattgtgactacattctatttgcagaatttcaattggacaacacgttcaccttccttttatatccaaaagttattccacaacaaaacatgttaaaatttttagggaatgtaaaaaacatgtaaaaattaatagtaaatattatcaaacttaaacccaatccatgaaagtgagattcaagattaaacaatttacacttggaaacaaggaaattgggggtttatggaactttccaaaactgattagcaagatcacaaaactggtgcttccgctgtttatctactcagcctttgtagccaatttcgggtagcaaccagccaaaggttgactattttagaccgaacagtagaacgtgcgaagtgtttttgcatgcaagtgaactgtgatttagagaaaccgagccacgtgatgcaatcccaatttccgaatacacatctggatgaatcattcgatggcaataaaagagagagcgctacgcatcagacgtacgatgcaagacgaaaaatcggacgtatccatcagcagttcgatccgcgtgcgcacatcatcagccatcaaacatcatcaagcatgcatgcatgcaaaaatattttaaactattttttctcttaaattatttatccaaatcatgatccgattgcaccattaaattcattgcaattaaatctttaaaacaagaccacacatggatatattccggtgaaaacttttttagcttattattgaattatttttaaatgttgcacgttgttccaccaagtatatcggaattgtttcactaggtagatcaaaaatgtttcaatcgtttaaatcggacgttatttcaccttatataaaaaaatgtttcagcaaatagcgaaagaatgtttcaagtcactgcaacatttgatctatataaagtgaaacatttttggtggaacaaaaaataaaacgaattctcttattagatgattttcataatatgtgggtgatttgttgcaaaagaatttttcagttcactgcaacattagatctatacataaacattgtgagtacactaagtgaaacatttttagtgtaatattgtaagtacactagtggatacttattgaaacactcaaccaacatatatgcaacatttacaaataaaccagtgaaacacaataaactacttactgaaacatacaaatagcaccatgagatacattaaagaaagatatatacatcgggacactaaataaatatgtgcaacataatagaatttcagctgaaacatctaattttcatatgtgaaacattaagtttaattggttgaaacatatgtgtgtttttttattataatatagtcatgtgagatcttgttgtaaagatttaattgtaacgaatacaatggtgtaatcggatcgtagattggatgagtaatttagaagaaaaatcattttttcaagtttgctaaaagtgtgttatgtacataccagtaacctcgtgccatctctctttcatgtatattaatacccagaaaggaagcatacgtaacagagagaggatctgacaaaggctgcatatagcaaaatcatagtaagaggtgtccgatttttttctcaagatcggacgaccggattgaagcattttcccaataaaagctcttacattgggcttcttaccaaaatatcatggtaagcatgacatcaccgataaatccgccacatttttatagtccgatcaaaatgtatcacattaaacagaaaatttaattatcgcaagcagaaacatttatgtctcaaaaatttcgacggaaaacaaggaggccgttccctgtatcaaagttccacagatgatagaaagaagaccttctagtaattaggaagagtttactctccatacagaaagccgaattgctcactaacatttactgattgatttcgactctattctaggatgccacatcattttaaccaaagacattttcgctagaatacgacagaaaatcgaccaagatcttcacatcgataaatagaaatcaagaatgcaaagatcctagttccacattccaacacacaagctgacacaagaaccgcaccccaagacctacgcaggatgatcccaagatttcacaggagcgagacatgatccaagaatccgacgtccccagcacaaatgatggcgcaagaatgtcaagaaagcttctccttacctttttcttggcgtagccatgaatcgcaagaatgctactcctgagaaacttcatcggggaatcggacttcttcctcccctctttccttggcgccttcagggaaaccaagaaatgctcaagagaaaaaaaaaaaacagacgcaagcgagatgacggcacaaacaaaagaacaatgcggcacctgttcccgatcatcaggtggtgccggagaagaagaatcttcgccgatcttcttcttccccttccggtcgaccgccgcagcggcggagctcgatctatcggcgccgcggcctccatctccgggctgctcacgtgcccgttcatgggcgcggctctggacggacgagggagggggcggcggcggcggtgacggcggagagacatcgccggcgccctcgggtggcgcggggatcgaagcatcggcggcggcggcggcggcggcgctggaagtggactcctgaggcccatggaccggcccctcctggtcttttgctgggccggacgtggacgccatggtggcgcgcgggaaaaagcttagcggggggagagcggtgggggctgatttgctaatccctctgatgcgagggggcgaaagagaaatgtgcgaagggtgtggctgttaattccagaaagggaggaggctatttataaaggtggaagtaattggcggttaccgagaggggacgtggcctttttctccagtttgggttttttttttggcgtaataaaccgaaaatgattagagtcgggcgaccggcgcgggggagccagatcgggcgctcccccgtgcgcccctcccctcacgtgcacacctattggactcacccacttctctctcccattttttcacgaaagatgtttcacctagtgtatttataatgtttcactaattatagatataatgttgtagtgaactaaaatatttttttcaacaaaaaacccacatattttgaaaactctctattaagggaatttagtttattttttgttctacaaaaaatgttatacctagtgtactcataatgtttcactatgtatagatcttaatgttgcagtgaatgaaacattccattgcaacaaaaaaacccacatattttggaaacaccctattaagggaattttgtttatttttttgttccaccgacaaatgtttcacctagtgtactaacaatgtttcattgtgtacagatctaatgttgcagtgaactgaaacattttttcgctatttgctgaaacattgtttttatataaggtgaaacaacactcgatttaaacgagtgaaacaattccgatatacccggtggaacatcgtacaatatttaaaaataatttaataataagctaaattttttttcgtctgaatatatccatgtgtggtcttgttttgaagatttaattgcaacgaatttaatggtgcaatcagatcatgatttggataagtaatttaagagaaaaatcagtttaaagtaattttgcacgtaaatcggacgctgacatcagcgtccgattttactcccaaccgatcgggcgcccgagccgtaggttcgtccgtaataaaccgtacacattgaagacgagtaaaatgtcacttttccagaaaaaaatcgttcatcttttttaactgaggtatgtaacagttgctataaaatatatatctgcatatcaaaatatctcaaatttgtttttcataaagtatcttaaaattcgaagctcccatttcctagtggcagaacatgcatttttactagatttatagaaccccataagatatactcacaccattttttaatatatgacaccattaactttttaacaaatatgttacgtttgatccttcgttttatttaaatttttgtgtaaatataaaaaaaatttaagtcatttgatgataaatcaagtcacaataaaataaatgataattaccttttttataataagttgaatggtcaaacgtattttaaaaaatcgatggcttcatattttctatatattagaaaatggatggagtatataacacaaatcataggtttgcaagttgtttaaaagtgtgttgggttaggggggattttttttttttttataaaaccccaagtaggaagccaacgaggtggcagggcgcgatggcatcgggccccctgtgcagacgtagtagaggagcttggacgtggaggcacgcagcggttgagcatggcggcgtcagttaggatgatgatctcgagcaggagctcaagaggcagttgctgccacgtcggcggcggcacgctttgaattgttggacaggtgtaactcggtcgttgtgcttgattgctggcattgtatagatagatggagatgggtgggtcttggaccgtgatagtatgggcctaaatgcaccgcgactctcatctgggccggcatgctttgcatgtttagtttcacgcatgtggacttgatgcctcgttattagattagttattgaagaagtacatttctagcccctcaaccacaaaactagatatatatagtgtatcccaacttttaaaaccagcgtcaatcaacctagatggtttagatgacattttcgtcctacgtagtgtcccacggcacgttgacttgatcttcctcccatacgatgcctatgtacaagtttatatggcataacaaattaggaaaaagaaaaaaaaagtgtggaaagcacatgtcattataacatcatttcctctacccccatctcttcttctctccccgtcagtgcggtggatcaaaggtgtgagggaggtaggagggtccaatggcgggcatcgacaagggagcatcgaaggggaagaagcgttggtgcagcgcaatgcgtaccacaacgtcgtcgatggtctggccgtgagggctagcaagcgagctgagataagaggtttgtgagaagaccgtggcggagcggtcgagctattgcaacggtgattctttgagctgcgaacgttcgctggcggcgcacgagcggcagctaacaattcttcttcctttgtcccaaactccattgctactcttttattcatatatactgacgcaggtgacgtacactctacacatgtaaataatagcttacaaattacaacaccgaggaggagggatattactgagagccatagaggaatgagaagaagacgaaagtaagtaccgtagattaatgagggtgtaagtggctaatccaggaacctacttataaattaaataaataaacatttaatttataaatggattcgcgggttagccacctacacctttaccttaaccttagataccaccggtacagcgcaacgctcaaaagtgaagactcctcgaaggttggaaccacacaatacacgacgcccacgcgtacgcagtagagaggaggatagagctagctcgctctggtcaacacgtgcacgtccatggcaccggccggtcatggcgagcggcactggagaacagtgggcgggtggaagctctgcgccctgagttgctcgtagaacatgttgatgaactcctccgccctgtagtccacgtcgatcagctccccgccgccgcactcccacgcgccgtactgatcaacctcctcgtcttcttcctcctcctcctggtccgccgcctctgtcgccgacggcccgcagccgcagggggaccggagcgcgccgaagcaggaggcggcgcccgcgcggcgcttcagccgtgaccgcagcctcctcgccgcgaggaacgccgggctggggctgttgctgcacgagaactcgcgctccgccagcgcgcacggcggccacggcgccgtggcgaggcatggcttgccgccgccgccggatgacaggagcagggcggcgagggacctcctggccaccctgccgaggaaccggccccgcttcgtgaggaggtacttgaggtagtcgccggcgagggcgaggaggctgcacagccgcctcctcgccgccgccgctgctgcgctggcggtgcggcgccggcaacgcctagcctccatggcgcgtgcgtgctgccgctggctgggaatgtaacctgctagggttttagcggagctaagcctacatggatgggagtgagaagagcatgaggaatctatgtcctgagactgtacttggtcaagctcaatctccttatatagctcttcgatttggtcgtctagagagaatgctagagagagagagtattgagatgaaagtcataggtgacacaagggagggttgcatgatttcggggcaagaaaggtttggtgaaactgggaagcaagctggccacacgaattagcttggctaggtaacttgttcctggaggtgatagtgcatagcgcgatcgcatttgcttttcatatttgttttatgcatgatgcctatgaaactattctaaactctcgaggggatatccactcgttgtttatgtgtcacataaatagttgtgaagatgtattaatatattatgtatcactacataaacatgtacttaaaatttaacttctacgtgtcgcaacaaaaaggcaaattaaactataactagttatcgcatattcacaatcaattttgtttttctcgttgcaacatgtacatctgaatttttagttgcgtgtttgtggagcgatatatcacatgttaatacatcttctcattttttttcacaactatttaagtggcgtgcaagcaacgaggggacgttccttcgagagtttaaaatccactctccatgatgcttccaactctgagccaaaaaaaaaggtaaagagtatggccggtccttaaacttattcgaccatattatctagatttctttaatctcaaaatacagatctaggttccaaacttattaaagtgtgtaactctggtctcaaattgacacgagttctttgggatcctacgtggcattgattagcataatcactaatccgacatatctctctcacgctcaatcactcgggcattcgatgcaaccgtcaccgtttccccctaccctagcgctccgcctttgcctcctcgtgccaccgaaaagagccaacaacgacagtgaggcctcttcgactgtccccttcccctccatctttttgtctttcatcgtccttcctaagccaagtgtgcgaggtgacaccaccttccctctcattggtgttgagttgtgatccaaattcatttgcacttaataaaggccagcttctgcctccgctccactacggcagaagctggcctttattaaatgcaaatgaatttggatcacaactcaacaattggccactcctacctccaacaccggcactcctctatccccacatcgcttcgccattatgtcctatccactgttggtactattccctccatggtcatccgggcttctaagccttggaaaacccaacgtacgcttccccctcccaccttaatcctaaccttgaaccctaactagctagggcgtcgttgctgtctctgtcgttggagtttgtcagggttgccagaaatgaagggaaagtttaccagaccatgaatcgcgcaacaaatctaagctaggttgaaaatttgcaagattgtacccttgattttctaccgaatgtgtgcatggtttagcaattaaaaaataattaacctgcccagagcgaaagcatgagcagatatggatttacgtctagtttgtatgatcgaaatgtatatgactatggcatgaataagaaaaatcagctatgttttctagaaagaaaaattgtagtcatggcacacgcggttggttttcttttaagaaaacaagtgatcgtgaaaaaaaaaggcttggtcatcacgattacgagtacttgcacgtactgcatcaatttcgcacccaagtaaaagcaaaaccacacttgtcagtagataccggtgcacaccgaaaaagggatcacacacacaaaaacatattctcgttggcccacagctaagcaaagcaattaagctagctagctattttatttttaaaaaaaaaactattaagctatagctaactatatatgcccatttgcttgagatggacagagagaattgaagttacttgagcagaagatgctggagaacggcctgaagaccaggaggcctcgctcaaaagctagcgagtagccgcatatcgacccattctatgcgaattgcatgcagctgtgttcgggttgctttccccggcctgcttctactaattaattgcttggtttcaccgcaacccaaagctaaattacgcgccatatatgattacatgtatacttttttttttttttgctttttctcctgatcgatcgatcagcgtgtagggtttctgacccttacctaaattactccgcgtgatatgatatccatcaacatatgaaattcgtcgtacgtatgtactaatatgatctacttcctctatttcagattataagactttctaatattacccacatttattatatatgttaatgaatctagacatatatgtgtgtttacattcattaacatctatataagtatgggcaatgctagaaaatcttataacctgtagctagttaatttttttccctctctctagctcttttcctcagtgtcattgtgcatgttgatgaagttagccaagacagcacaactagacagctagaatgcatttcgattgattgtgtaggctctgaagattagctttcgaattaaatttgaataatggtgagtttgtcctagctagaaccattcaattgatcatcacttcatcagttattattgttttggggactgaatttttttctcatgtgtgcaaaacagccagcaaattctgaaaccaaggggtgactcgcccactgttttttgtactgcctggatcagtggattttaccagcagttctgaagcgcctctgtttcacgaaggaataagttcatttggggtcccttaacttgtcaacgaatctgattttcgtccttcaaccaaaaaaccagatacaacggatccctcaactgtcaaaaccgatacaatataggtcccatagcggtttgcacagtggttttagctgacatggtgtctacgtggctaaattgactcggtcttcatctgacgtggcattgatgtggcattgacgtggcaatttgatttaaaaaacaataaaaactgtgaccccatggtttttattatttttttcaagatcaaattgccatgtgggacgaatacctagtcaaaggagccatgtaggcgccacgtcagccaaaaccgccttgggacttatgttacaccggttttgatagttgagggacctattgtatctggttttttttgaatgacaaaaaaaatcggattcgttaacaagtttagggacctcatatgaacttagtcctttcacaaatccagcgattccgtggtctgcactctattagctgctgcagcccatctcacaattttcttttgtgacaggcgagggcatttttgctccctcccgtaggctcattttccttcagagctttcctttagccgcccttctggctaatactcctatctaaatttaggacaactggacaagcacgatttacaaccaaaagaattcggcattcatgtggttcatttcgcctttcatttttgttccttcttatttagttatatagaaagtaaaaccagacatcttcacctccaactttacaaaccggacaaataacctccagctcaatccacggtggttttgaccctacgtagcagtccagtcagtaattcatttatataaaaaaacagatggaccccacctatcagtttctctctctcttctatctctttcgcaatctctcactctctcttctccatcacagggcgacggcggaggcatcggcgaggcaaggcgagcgcggtggcggtagcggcggcggcaaggcgagcacggcggcagaccaaggcgaggcggcagctgcttagtactcctccgattcttgatgcatggtttcgtacagcgggtgggatttttgcgggggctagtggttggtttctgtctggtggtgtggccgtgcacgcgcccgctcgcgcgcggtgttcttggcgaattgcttaacttgagcttgctcgccctgctgcattggggagttcttttctttttactgggttcttgtttgtgcagggatcgaccgggggggagggggtttgatggcttggtttcgcgaatgttcgtcgcgaggtgcgcgtggctcctgttttgcttgcgagactttatcgttttcttcgttgcacgctcgcctcgccgccgcctcgccttgcctcctccgccgccgcgctcgcgtcgcctagccgctgcctccaccgccgccctgtgatggagaagaaagagaatgagatcgggaaagagatagaagagagagaaactgacaggtggggctcaccctattttttttataaataaattgctgactggactgtcacgtaggatcaaaatcactgcggattgagccggggggtggagggtgggggctatttgtctgatttacaaagttgagggtgaaggatgtccaattttgtgattcagggggtaattcagtctaccgtgattgtccagggggtaatttataccttttcctacagaaaatacatgcatacatacaacacataacactcgcatgtccgtggccacaatgctcacataacataccttgaaagtgagatggagaccaatggtacaatatgctagctatcacgatagtacaaatatactatcgtatcgaattatttttggcatactcgtgagcatagtaataaagtaaacgaagcaaccaaaatataatttatatataaaacttttaaggtggcaaatggattttgatgtaaaaattgaaatcaacggctcccatcggatggcctaatcagtcaaataaaaaaccaaattttaaattttcaaacttaattttaagattgattttatgatattttcaacatagtttcttttttcagcatatatatatatatatatatatatatatatatatatatatatatatatatatatgaagcccatatactactaccgggagtagctactcttgtattagccatccgacacctgtcctcctctaattgggttgcgggtctcatcccactcacggttagagagaaagcatccactaaccaagccatgcagaaattttttttttgggaaaaatcggtttatgatcttcatgcaaggtcgtttgaatgttctgcatgcaaggcttgataatccgcgcacatgcaaggccgtgtgaacaggggagtcgttagtgttgtggttgttatctagtcatctatttaagacagcggccaggtagggtagaagagtaggttgggagcagaagcatattgaacagttctgcagaaattagatggagcagaatcctttggtggtagatggtagaacctcgtctccgagttctgttgcctctccttccacggaggcagaaggtgaaacctcatcgatgtgtgatgtcgctgagcagaagccggtgttagccgtaggcgtgtcgtcgccagtgagttctggcgagcaccacaagccgacggtggaagaagacagaaccgtgtcggcgagtggagacgtgcagcagattccggcggtggtcgccggtggttccttgccggcgagttcttttgcgcagcagaagagggaggtgctggaagacggaaaactgacgaagggatgcgagtgtgtgcagaactcatccactgattgctttctgttctcttgataattttcctcttgtttgtctgtttggttcttactgtgtgttgtgtattctttggtcaggactggttttgtctgttgcatggctacagcagaccgaagtgaagcgatgaatcgctctctccagaagtacaacatccatttggagagaagtcatcctctttccacaacaaatcgtacaaagagatgcgcttggtgttcgcttcgtgatattcgcgcagcttgcaacatgaatttcagaagcggtggagaaccccggtgcgacagaagctgttccgaaaatgtgtcgaaggagaacatgtagccagccgtttagtgaacagaaaaattggaataatagcttgctttctgcaagaccgtagtttagtcgttcaaactgtctcgttttgtatggtaatttctatgatagagaagcgagtattatttgattttagatttatgtaacttatgcgtgtcagtcagtgaaatgataataagaaattttccttactttttgctattttagctgattgtgttttgcaaattccgtgttgtcatctttatcgcgaacgctggacaagaagatcttgtacgtgcagaatttgtgcagaagaatagagcagaagccggaaatagttaatgtgagtgaagagttgcgttgcctcaattttttctagttgctatcttcgcggcggcatgatctcttcagaattagtttgttttcgtagtggcagactatccgtggtccacgtacgagccttgttttttgggaggtagttgagcagctggtggaaaataattctgaaaataattgtcagtatatatccaaccatctgaaaacggggaggcacttctgcaaattctttttcactggaaggataccagccggactccgtgctggagagaagaaaaattttcgaagctagtccaatatggactcagaaaactcgactgagcgaggtgatgaggatcgtagtggccaaaccatggacattgttccgatggaaaggtaatggttttcttctctctgggattataatatacataaaccctttcataattgtttgtttcattcttacactgtgatactaggatcgtagttgaggaggtggaagatagtgttctgctgcctagtttactttcagacccaaccattctggtgccgaagattgggcagacctttgatgaggactctgatggctatgcgttctacaatttgtacgctaggttcactggttttggtataaggagatctaagaacaggttcaaagatggaggtgtcaagtccatgcaggagttctgctgtattcgtgaggtaaaatcattgcagttttttagggaactccatggtttcgtaatttcattggattttgtagtttgcagaatgtcctatgtaggaacattaattgataggttttcgcataacaaggtgttcccgtaatttatgtagggtagggataaaaccgtaactgggccgccgactaggataggctgcaaggctatggtcaggttaaatcgttcctctgaaagacaaaagtggagagtttctgcatttgttagtgagcataaccatggtatgaaacgggacatacagcatactaagcacttcaggtctcataatttcattgatgaagggacaaagaggaatattaaggaaatgatggataatgggatgacacctactgctatgtatggattagttgctggaatgcatggaggaccgtctttaactcccttcacaaggagggctctaacaagaatggcatatgccatcaaaagggatgagtgtagcaaagatgtgcagaagacattgaacttttttagggaaatgcaatgccgtagtaagaatttcttttacaccatacagatcgatggtgcttcaaggattaaaaatatattttggtgtcattcactgtccagattaagttttgactagtttggggatgcaatcactttcgatactacatatcaaactaataggtacaacatgccatttgggatttttgtcagtgtaaataaccattttcaaacagcaatttttggttgtgccttgttgagggaggagacagttgaagcgtttaagtggctttttgagacatttactgaggctatgcatgggaagagaccttctgcaattctaacaggtgtgttctcttctgggttgttcagtgttttgtctcatgttctttgctgcagtatgtaatctcgattggttgtgatcttctttgtagataactgtcatcaaatggaggtggcgatcaaagcagtttggccagaaactgtccatagagtttgcaagtggcatgtactgaagaatgctaaggagaacttggggaacatttacagtaaaagaagcaagttcaaagaggagttccaccgggtgttaaatgaaccccaaacagaggcagagtttgagaaggcctggaaagatttaatggagcagtataatctcgagtctagcgtgtatttgcgcaggatgtggggcataaggaaacgatgggctccagcttacttcagggaattgttttttgcaaagatgtcaactactcaaagaagtgagagcatgaatcatgttctgaaaaagtatgtaaaaccatcatcttcactaaatggatttgcaaagaggtatgagaatttctacaatgataggattgaagcggaagacgctgaggagcatgacacatataatgtatgtttcttttatgttttctacatgatatatcggtgttctgtaatttttcttcgttgtgttctaatctgcttgtctttttttatggaatttcaggagaaggtttcaacattaactagctcgccaatcaagaaacatgcatctcaggtgtacactaggggtgccttttctaggttcaaggagcaattcaagctcagcttttcatatatggttaatcaaactttggatcagcatgttctgcagctagtacatattggtgatgacaccttgcaaagttggggcagtaaagtttttgaggttcatgttaatatgacagaacaggagttgtcatgtggatgcaagctttttgaacacttgggaattatatgctcccatattatcagagtatgttcggttattaagcattcttgtatcgctgttgtgtttttctgtgttaatgcattttgtttttacaggttttggtacagtacggtttcacggaaataccgaagaaatacatcctgaagaggtggacaaaggatgctagggattgtatcccaaagcacttggaggagtcttacttgaatgataaggaggcagcagcgtcgagaacttatcgcaacaccctattgcacaagtctatacttgatttggttaggcttggtggtactagtgcagaaacatatgagaagacagtggaagttttgacaaagctggtgggagaacttaaggtcatgtctaattcgcaagaagcaaacaacaatgaaattcgtcgcagaggaagaacacttgggaagaaacctgcggttgagagtgatgacagttctgactcgaaggattcaatgtctgatggcatatgtgtaggcgttgaagacgacgatggagaggatgtttctgctgacgaggatttcgttgttgaggacatgattgatgtaaacgaagaagacatactccctccagaggttagaagaagtcatggacggccgaggagtaccaggctcatgtcaaagggagagacctctagcaaggcaaagaagaagaaagttggtgagagtacctccaacgacgagtcaatgaatcatgctaaagaaagaaaacaaccaacaaagcagattaggtactgcaagctttgtggtggtcatggtcactataggaatacatgtggtcgcaagtctagttatgagaggaagaagtgagtgatttttctctttccaatggattttagcagaacatggggcctattgtaatatatttcgttagcagaacatgtagaggttatgtttaattggattttacaaacactgtttgcattttacgaactctaatcgtggtggaaatagaacactttgatcttcttgttctgcacccggagcagagcaatttcttctgtttggtttgcagcagaacatttcacgtactttctgcttgagtttgtttcgaacgaatcatggcaaagcatggcatgtttttcatcttgttctgcactagtagcagaacatgtctgtgtcacgtagtgtatgtttgattttgtttcggacgaatcatggcagaagcttaacatgtttttcatcatgttctgcactagtagcagaacatgacttctttttagtttggtggtgttcatggtctgatttggagccaagcaggttctgctctcttttcgaaggagtgcagagcatgtagtaggattgttgatgtgcacactgagtttctagattggtgagagctgatcacgtgatgtattgcaattatagatgtaattcaatactagtacagaagttgctatattaaatcaagggttaatttgatccgtgccactgcaaatttggttattcagaaaaatgccattacaatttgtttattcgtaaccgtgccattgaaattttaaaaaaattagaaccgtgtcactcctgttaccttttttatctatcccctccttttccatcttctccgtcgcagcgcaccaccgccacctcagtcagccaccgcacgcggctgccgctgacagccttggtcgaggaaccccacggcctcctccaccggcctcacggcctcgtccccacgcaccaccgcctccttggctctagcgccgagaccgacgccgccggtgaggtgtggacgcgcagataggcggcgggagcaggagatgggcatcggcagcggcggcgattaagctcggcgatggaccatgctgcgatccattctccgccggcgagttaattgcacgagttaattagtttcacaaaattgatctagcttccatgctacgatccattctccgccggcgagcagtcggcagcggcggcggcggtttcgtcgtctccgcttccgctcgcggcggcgtgagccggaccatgtgttcgtcgccggtgtacatgcgtacgccacctcgagcggcacaggtggtagccactactactcccgctgcctccgtagctgcagctgcgacgagcacagccggcgccgacgccatctccacttggtgctggatgactggaaggaggggtacagcctacacaaagctcgacttcagccatgtctccggcgacgacgccaccagttgcgccgatgtgtgaagccgcgcggacgccgtgcttgccgccgccgccgcaggttgcgacagagccgccaatttcttcgattctccttttctctttctcttttcttcgatttcttctttcctggcttggcatggccggcggcgtgatgcggacgaagctgggcgacgatggcgcagcccgacgagggcacgacgaggtcgggcggcgccacgaccttgcggtggccggcgaggtgtggatggcggcggggtgtggccgcgcggccctacggtggccggcgaggagcggcgcagcaagccgaggacggctcggcgcggcagcccgaggccaacgtgcggcggaggtgcggcggagctcaaggcccgaggccgaggtgtggtggctgattgaggcggcggcggcggcgatccgtgctgcgcgctgtaacggagaagacggaaaaggaggggagtggcacggttctaatttctgcaaaacttcaatggcacggttacaaataggcaaattgtaatggcatttttctgaatagccaaatttacagtgacatggatcaaattaacccttaaatgaacatggatttgattttggtataccctggatttatgacgtttggaaggataatgacagaatccttaatttgtaaaaagaatagctgggtacatatagccttgaatacagttataccagacataaattattctgaactaagaaattttcgaaagaaaaatgctgcaactattctggcttgcttgcataacatgctcatatcttcttagataactttaggccgtgagtgacgaagtccggcagaatagcctcgtttttcttgaatgacagcaagttggacagaaactcctttcgaagatttccttgatcctgttgttatcacagttaatgaggggttgacaagacgagttccatcccagtttctcatgtagtatagcacatgaaaggcacaatccagcctagcataatgtaagtatagtaatgcccaaatttgagtagaatgaaaatattaatttagatcaaatcgggattatcaactcgaacctgttatttaaagctggtatggtcgaagggaactcagaaacccagtttggtatatcctcgtcccaatccggaaatgcaagattcatgcactccttcagagcatttgaaatgtgaatctttgttttggagtgtctttctgcagtatcctccgatcttttcgaggcgtctctcagtgggtcgaggatgcataattgtttttccccatatcaaatgcgtaaagagaatagtgcagaggttgaaggagtggaataaatatctacagaataatgttgagaatgcaaaagttagtggcctgcacatttgcacttgacgtaattaatttttcaagacgctgaaaaatgacataccaggtggcaacttggtaggtcatatggtatcagggagtcatctttgaatgatggtagatgatcctctgggttccataggtcatcactagcagttgcaaacatctacagggccatattaaaatatttagacctttaaaatatgaattaaaatagttgagtgtaactacaagcacttactgcaaaatcctggtttaagaaatgtctccagcctacgaaatatgtccctccaaatctatgtatctcatatgatgccaaaacttgaactgcaacattgaatgtttcttcttgcatttgagtgtctagccgaatagcctgctgtatgtcatgtaggcttaatgacatagggacaggttgagagatgtgaacccaaattttcctggtaaatgtgatatatgtattataaatgatggttgtaccaaagaatgaaacatttcggataggtggcttacttaacagcttcttcatcagtgattgaagttacataggtgtataaatcatcaagtgccttcaagtcatgtctgacgaaagagtgttgcttgctcagaaatggtgatttcaccgaacggcttggtttaatagacctctttggccgatcgaataggatatcagaaggacctccgataattctcctcttggatttaggtgggaactttgtacatgcgtactcctcacgcatgtaaatcctcgcaccactcgtctcttttagcaaagagtgcggagagaaactactaagttttgtttggcggtaacctgttatgattcagaacagtcaaactaagtagtatcatgtggttggttatgaatgaaaataaaaattagaaacaggccggtggggataattaccgctctgagaaaagggagttttctacaccgcattatcctctccagcttcgtcagaggcttgtactaacttcgagattgcctgatctggggtatgtgctttgagttcttgtgctttctcagagtcttcaaccaccttggagatgtcatgacctggggtacatgccaccatgtttgcatcttcgatatcttgtgtaatacctagatcaaagcttgggggctcgatgtccgttcaggtgtcgaagcttcgattcacatgggcagcctatgcacatgtatattaacaattattatcgcaaatggattttttaatatggaatagattaacaaacttcatgagattgcacctctgttgcacccgtaggatggccaagattgcatttttcaacatgtcggttacgcagctgaaacaaaaaaaaatccaaaagtctgaactttctgcattcgggaattgtcaatatgaatatactacttgtaggagacttgattttaccttcatctttccatacgcagggaaaggtttccggttcttgagaattacatccctgtcaatgaattctgctatcatggagtcattgtacacgccaatccttgaaatgttttcatgcccaggagtgtccgtcccaaaatccagatggtgcagataaaaaagctgagcagtataaattatagcatgtgaaaagttgatgcgagtatagcagaaagtaaaaggcaaagaattccaacgaatactaggataatctcacctcaggtagtataatgcagccattgatgtaaccaatgctttttcgatggcgtattttgtcttgcagtgctgctgctgcatctttaatctcatgcaaaacaaattctgcccagttgtacttgtgaatattttctacatcaaccaaagccttcatataccttatagatatgtgattgttaacagattgaggagccaagaatttggttacaacgaagattataaaagcagtcttgaatacaatctgttcgtgaacagtcattgtcctggtaaattttttctccaaaatcctctgaatcgttgcaattgttattccgtcaaatgaatctttctcaaagatttcacacatataagccttaacatcttttacctcgtttttaattgcaggtaaaatctgcttccgtccacaagggattcccaaaagtaagctgacatcctcacaggtcaaacaaatttcatgtttagatccagcaaacagattacctgatgatgggtctagcttgcacagaatccatgctccaaattgcttgttcagtttagtcagtctcatggaaagcaacccgtcaaaccccatttgcctcactagctctttctgctggtcaccaatatctgagaacagatctgagagaatagcaggagtgcacctggtgtaaattttttcttgtactacctttttacccttgatgccacttgtttttttggaatttgagactgcaataccagctagctgcttccgctgatacatctttcttgctcgagcagcatggagagctctagtgagaacagaactagagccactaccacctgaaacattcgcacctgctgcaggactgcaaaggtgctgcaaatgcaaaccattaacaaaatgaattagtaacagatgggatcaagaaaagactcaatagtaggaaaaaaatccatccatggccgccacgagcttcgacggcgctgtcgtcggggcgctcggcacgcacactgtgtcgcgcaagattggggcgctcagcgtgttgttcatcgtcgccatggcctccactgtactcaccggaaaaaaacagatgaatacgccaacaaaccttgaaacgggagttctccatgctagagctttcagcacagccgccggcgaggctaccaatctgagtttagttgtgttaagaactaacaaaacgcagagaacgatattagattgataatgttctgctcgacgggagaatcatcctgctttctcgctctggataagaaaactcaagtgcgaataaaccacccggaaaaatctctggttagctcgtctccgaacaaatttctatctacaacaaactgattactcttatttcaaatttcgaatctggtgcagaagagaaacaaccttctgttgatcaccgagaaaaaatacgggtaaaaaaaaccggtgaaaatattggattcattaaacccgttaatagtcattaccattatcagggcaaacgattgaattgagggtggatagggagggagtagcactcccggtagtagcatataattttcatatatatatatatatatatatatatatatatatatatatatatatatatatatatatatatatatatatatatatatatagtaaatttgtttggtgctccatggtgcccgggcaccattgttgaaattgagtatatacctaattcaaatgagtatgaaactttttcaattacttagatattaacattagctactttactaactagttcaaagcaagtttgaactgaatttgaacttgtttttgttagattttgattctaggtatatagcatccatacatataattagttaggtatgtaatcatggattgtgaaataaagttaaatttgagttattttgttgataggtataggtatgaatcgagttattataactaggtatatactcacaatttgaaaattttgaaaaatttgagtgattttgtgtatttgataccatggtgcccgggcaccatggtgccccatatgagtgtcctatatatatatatatatatatatatatatatatatatatatatatattatacctacaaattcatttttatcctctaatataccgagccaaacgatggggcctaacagtttttaaaattttagatgttggttatggctgataagcaaataatcaaacgacgagagggttagaattaataccgtagttactaaaatatgtactacaaattgatgaatggaagcacctaactcaagtcaccaagaatctttgatcagtattccagtcccggtttaacactctgtactcgtgcgagcccggtcgttggggccttgaccttgacgcctaatatggtgggcgtaggttgtattcttcttcttttttaaaaccacgtaggttgtagacagaatctcatatcggagaggcagcactttgtagccaatttttgcgtcagagtcgctcactcgttttgtcgtcaatatcacgaatcaaaggttgaatttgaattgttatcatgttatatagtgtaaagacagaaatttaccccgttctttcattatccatcgaataatttcgacaaactatttactccaaggtttataacatataattagcttagaaaactttgttctactggattacttatattttttttaaatatatttgttaattttatttttcaaaatatttaatttaggaaatacatatttaatattcgatgaaattccaaaaaaaattctaaacataattacaatataattttagtgaatatgtaaccacaccctttgtttttatgctcctagattttgtcgttttttacttttagcatgacatttgaccatttaccttaaaaagagtatcatttatttattttgttgtgacttattttttcattataaaaactttaaaaatgatttatatttttctataatcacaatagatttttttgaattagacaatggtcaaatgttatatgtacttagaaagtcaataatgtcatctatctaaataaaatagatgcagtatataaaacttacgataactctgtgggagatgtatgcgcccacagtagagaggctgcatgatcgagtatcgcctacatgtgtctgtgttttatgtttaggtctatctatataccaagtaccaattgattaggaatactgcctagaattatgtgatttttggattgttggattgctttttaagattcgtgcacacatccataatcttaacccctccgtccttactctcagcgctgccatcctatatacttgaatccgccaccatgctcgagcactcaatactccaccgtcaccttcccagcttgccgccactcagcctcaccagctagctgaaaggtgccggccaacaatgtcggcgaggtctccctgaccggactttcccacccccagtcatcttctcctcctcaagccgacgatagtgaggggccctcaccttgtcatcttccccgtcttcgatattgtccgcctaccattattggattcaccaccatcgatcactgcctcctaactagtcactttgttttatgctgcagccactgcatgagcgcccaccctagctagtccaccgctcactgccaatcctaagccgcccatgaccatccttctaattgtcagggaaacccccttcttcctcctcccctcaccccctcctagcctgaccttaacccagaataggaccactgccgccttattgtggatgccaatcttgacacgtattcaatggtcaaacattcaataaaaatcctcctaaatttttgttgcatgaaggttagcaattccattttttatttttcccgagtgaaaacagattatagtagtgttggttgattttattggatgagcccacgagtctaatttaaagagatgagagagaaattagtttttgtgatcggttaaaactgattttgagtattaataggagataagctcccgagccgtaccaatgatgctctaatctctcggccaaaaccctaaaccctaatagataccgatctgtaattgcactggaagaggttaataacgctatctcaattaccggcgctcgatctagcgagaagaagagaagcaaagccgaagaaggagaaaaagaaaagaagaaaaacaaggaatcaatttcaatggcttctagtgtaggccagtagattaattaatttgtaattcgagtaaagatgattgtttatataggctaaagtaataaagtaataagctcctgtaattcatagaactccaacgagtagcacagtatattttctcaaaaaattacaaaatacagtaggaagggtatattgaagcagcaaagaagaactacaggccgcccacattctccgcctatgcccaaaacttaaacttaggtctggtttagttcccaattttttcttcaaacttttaactttttcatcacattaaactttcctacacacacaaacttccaacttttccgtcacattgtttcaatttcaatcaaacttctaattttagcgtgaacacacacctttaagcaaacaaacaaatttaaaacacaaaaataatttaaaaaaacgaggcagagggcgcgcggcacaaatgaagaaacgatcgaacccgcgcgcagcaacgacgatgacgcacgtgctatatattcaaccgtgcaaccaccggccgtcccactccggcgccgccgcgtacccgcatcccccgccgtacatcgtcgccgccgtcggcggcggcgggtagcaactcaccggaatatcaaggtctaccttcgggtacatcccgcttctgttgatgaccggctccctcactgtcggtggcgggtagtacacgccgcacgccggcgacggcggcggcgggaataccgcgacgggctccaccggaggagtcgacgacggcggtggcggaggagggtagcacgtcgagcccttgacaatggccgtagtatgaggcttcgccggcgggtagagtagcatggggatgagttgctcagtcggcggccagtctattgccgggtacatcgtcgacgacggcggcggcggagggagagtgatcgctctggatgcggctgagcgaggtggagtgatggagtattcgtcgcactcgctgccgctggtggtggtggtggtggtgctcctccggtcgtcgtcggcgtcgctgctgggtgatgacgacgacgtgtcggcggcggcggcggcgtggacggcgtaggagaaggagatgacgccgttggggtgcttcccgtcgggcccggcgagctggtacgacacgcgccgcgtcgcgccgtccgccacgagctcggacaccggcacggcggcggtcgcggacagcacgtccccgagcacggccacctccgacttgagctcgaaccgcaagagaacctcgtccttgttgtcgctcgacgtcgccggcgacgacgaggaggaggaggggaggtagagccgcagcggcgcgtcccactccgggttcccgccgccggcgcggtccgtggcggtcttgacgcggtgcgggcggcggcgcccgcacgacgaaggcgacggcgacgggtggtgcaggtagatggaggcgtagaggcagggcgtgtggaaggggacggacgacctgacgcccctgcacgagacccacgtgatgtcgatggccgccggctccggccgccgccgcggccaccaccgatgatccatcgatcaatcgcttcctcagctcctccagtacaacgcgcgcgcacccaacacgtacgtacggagcagaagaggggagaacgagaggagaagatccagaacgagtgaggttaagaagggagaactcgaccgaccgagctgactgcgaacgatgacgcggtggccgcgcgagggagggaagacgaccggaaggtggacgtgtctacgtgaagcgatgtggaggtggtggttgctcgcgcgctcggctcttgacacggtcagcattgaaaccaaagctaacccgacccaacccaatcagcggggagccactgcaattggggtttggtgcgcgtacgtgtcacggggggatgtaaaccaaaaattaaaatttgagcaaaattctgtgaatttcaagaggctgaggaactagcgatgatcagtgacaggtagcatttgtgaacccggtgactttcctctcccgcagtgtgtgactgtcagaaagttatacgtgtgttccctacctccaggaccacggattcatgagcctgcaggaaaaaaatggccatcgatcgatagagacagtgccgttccgcgcagtatcgtggaaaaaactgcacaatgacacggtcgtgcgattaatcgtttactagtactcgaagaaaaaaaagatttttttaataccgtatagactatggactatacgtggtgatatacccatcgccaacgattaatttggccaactaatcgacacacatcgccgtctttcctcagtgactttacaattggagtaattagctactgttcgtttcttcggcgtcaggagagcggtagctgtaccagtcattaataatagcatataggtttgcattgacaggtcagacaagttatataactatacgctcgcttcatgccagcaaatttctgccttgaaaggctacgtctttcgctgtcattactgaagcttttccacgagatgacatgaagatatctccacaaaaagaggctgcatataatttgggaaggatgcaggattaaaaaaaaaaacagggtgaaagttgcttgggacaccaatgggaagagtgaattgaatcattgaagtttgttctaacatgtgtggcgtgtttatacaagtattgtaggcacctgtttcgaagaaatacaacaacctgggtatggacagtgtttcaagggaagttttatcgaactatacactcatgttacagctaagctataggggtggaataaacagttgccttccggaagcaacaaaaatttactggcatccgcttggcaacatccaagtaagacatttggcttgtatacctgtaattcaaatcatcgtcaactatagattgtcccaatcggtcgaccgcaaaggaatgtactttgatcggtcggttgcgattcctctgaaccctgttgttcgtgaggagaccatcggcatcgcaagcaccgatgaagcgctgatggtctcctccccaaggccaagtgacatggagcaagccgactgcaaggaagatcacatgagatgagagtcaaatacaggtacaaaattttgaatcagttctatcaagaaaaacaaatcacctttgccttggacagtatgcgttttgcttttacttttactgaacttgtgaaggagttagtaccatcaacttctgtctcctccgtctgcatctttccaggcctgaaatgatacatgtgttttaggcgacaggcaaaacatttctgcactatacaggttgaaacttgatgcatcttaatgcaaagaatagatttcaacaagacctgtttgcatcaattgcaggttcctgggtggcactagaaccatctttggtgtcaactgccaagaattctcaagttaaagtcatgtatatttctgtaaaagcacacggcagtgaacttcacaaacctttactgtcgtcgggtgccagtaaggagatgcctataaagacagatgtcatgcccaatacaaacatcactatcctcagggtatcaaatacctaatgaaggcaatccaaaacccttagtttatcatgagcaacacaagattctcatgcttacgataatatttacaaacagaaactcacttgatattcttgaaagtacacaaatcctgtgcaaatagaaaaaaaggtccaagcaatctgaaacattggaacaatcagtattgcatcaaaaagagacaggccttcattcaatctcgccatctgtgacacagagaaggttaaattagaaaaaaaattattatcgcaatggcatgaacagaagtccaaagaacaacgctttaggttagtgcctgcaattagcttaattacccaaaagccagctgtaaagaggaacaacagaagcattgagtatgtgaaccagctatggaactggtatctgctgctcattgttagcctcagcatgtttgacctaaatagccacagaaaaaagacgaaagaaaaaaaaatcaatcagattaaaaaatatattcaaactgcagcaaatgaacataaatctcaatcaatacaaagtaacttacaatgattttgcaaataagacagaacaagatccaatagcaccagatacaatagcataagaaaatggcaacaatgtccgccaatgtgagccagtatgtttcgcactatccgaaatgatagtttctccactcctgcaacgggattattatttggtctgaaagaatatgattctgtgtttcggcatagactaggttatatgacaagatctcacctgtagagatactgattgaatgcaaccacaaagaccagtgacatgcaatagagaacaaacactaaattgctgtatttcgcaactagctgctccggggtgtaaactgttgaaatgattatggcatcagaatattcactcagggaactgagataagataacgtaaaattgcagtacattataaaatactccctccctccatttttctaaaagcatgatatgactcagcatggtatttttgaattgaactttgactgtaaaatttatcttcgcaatatattgctatttaattagaaaatcacgaccatttgaaagtacattggagtagacatgtagaaatatgatggtaccactttctattattatgtctatttttgtttgctaaaggggtatttccaagggtttgataaatatataatcagcctaattgttggtcaaaggtttgaatcttcaaatacgtgcaactgaattgccaattaaataacaatggaagaaccaactgaaatttgaaatcaaacttattttagggctatatacagacagaatgactaatgatgtatggattaactcatacctggagattgatgattaccaaaggaaactaggaagatattgccaaatacaataaatgttgttgctaccatgactctgaaaagcagagtaaaaacttcataaatctataattccaagtattggaagtttggaactcatttcctttataaaaaaattccaaaaagtagaacaatgcatacttcactgaaatggtcttgttcaacacaaagtaagcaaatgcaatattggacacaaattgaatcgatccaagagctgcaagaagtgactgcaataaaattacacaaacaatcatttttccaagttacgttaattgcaatactggagtggatatgaaaaaaaatatcattgggtggaatcactagtactaataattaagatgttacatgtcatcagcaagcaccatcagaagcagcaaagttagggtgtatggtaatgttaacatcaacatgaaaaaaaaaaacaagaagctcagagtccaggactataccaaaattttcaatataaagtttcaaacatacaatttctaagatagctttattcacgagtcgtctgtgcaccacagagtctattacatctataccattattgcaattattaacttcgcctcaaaaggttacaatagaccaacctgtgcggcatatgcgaaggacatgaagttgaggcagtttcccgcagcaaagaacagtatgcctgaacagaattttagcattaaaagcttgtggtttccatttatttcatgaatgatgttagaatgaaaaaagtaagccttacagggaaaacattacctattctccaagtttgaaaatgcataactgacttcggaacaaatttgtcattgccttgattgttgttggttgtcgaaagcttctctctctaataataagatacacaaaatcatcacatattttccagaattgtatttgttcccaacaacgttacacaaatgttatatacccagataagacgaaaaaattaacataatcttatacaaaaatcagctgcagcattaccaaatattgtcatgaaaaccaggttatatttactgtgctttccactaatatcaaaggcacaagttattgcagacaacctactcaagtaaatttggggctagggcgatcctaatttattagcggaaaattctctccaggcaaactagaaataaagatgaaaaggttgtaggtcatatggtaagttggtaacccagattaattccactagggataaagtaaaaagtaactaatagtccaattcagagatgtcatatgcacctgatcatggcccaatttcagaaggttggtaccaaagtttatggcaacactccccacaatgttgatcagtgctcctataacccagtcgcccatgagtcagaaaaatataggtgatcgcctataaatatatgttgtattccttcaacaagccccttgtatgacaactcattgcatttgttttggaataaacactttgaagacttgactgaatgttcaccccaatagtctggcacaaatgttcaataaaccgtgtggagcttatatcttggttgatacggagcctgcaaaaatgtcacaccaatatatcagccgcttatactcaggattactaccattcaacaagagagttatttgatgaggtattcaaagatgacctagcacaccagcataagcagagcacggaatatcatgaggctaccaccatgtctgttacttcagaacagaatcttccaccgaacattcccaaggacgacaactaactttgtgattaacaaaatgtcatgctacactacgccgtccatttctcactacctaatctccattaggctactgtagtacctttgctggccatttgcaacaactaaaatcctactacttcttgcgggaggtgaaaagagtcactccccgaattcaggaagcaaaatgcagatggtgcctccaatcaaatagcaaccattttgatcgattaatcatcaaatcattgcctaagttgctccaagcgctaggaaagcatgaatgcaaacacattcgagcaaaccacaaacagaaaagggaaaaacaaaagtccgttaacgactacccaaaaaaaaaattcggcgcggatctcatctcgaaactagcaaatggcgcggatttttttccctctttttgcggtgccattcccgactcagatctagcgagctcgcgccattggaagcaatccccccacgaaaaaaatcgacacgatttggggggaccgtaaatgcgcgcagcacatcagcattcacaaaaataaaattgaaaaaaaaaacatgagaaaaaggcgctcggatcgatcacctgcgacggggccggagattctagctcaagcacaagccagcctgctcgggctggattctccgccgcgagcgagcgagcgagctggatgaggaggaggaggagatcggaaatttgcggaagcgtggaggaggaggaggaggaggaggaaggggaagaggaaagacgagggagagagagagaggagggggggggaggacaggtggagacggcaggggacccatgtgggccgtcggatctcgatcggacggcgggggaagggggagtctggtcaggcgcggcggaatcagacagggacggacaggcagacgacagcctaccgtgcaggttggtcctcctttttatttctccttttcttttactttttttaaacatgtgtttgttcttttggtggagcaaagatgactgaccttttaaaccaaactgcacaaaacaatgcgagattttatattatagaaaaaatattagaccataattctaaaagactatataatataaaaaacaaaatagataaaccacacaaccacactcctaaaatatcccattaccgctggttgaaacaaatgtttcaagattgtttggggttacacttatcttgttgtcctattttttctttcattttttttaatttggttttgcttcatgcggaatttttgctgctagctttgagggtcaattaagctaagctaccaaccttggagaatggagggtgaacctttcctttccgtgtagaccacaaaggttgtgtccctttctttttttcctctacgtgtaattgacttcatttagaacatggaacatgagctagagatttataaaactacgacctactagaaaaagtttctctggaaatcttactatgaaatagaaaatctcaatgtaaagatacttacggttcttagagaggctgtaccatattatggccttcaattttgtctagtctaacatttagagcgctcggtaattagtggtacagcaacttaccgagaatggatatggaatgccttttgatgatggggtaagattgttctttcacatgtatattgttgggatcaaatcggtctcgtcatttgtcgactacaaatttgtgcaagcacctagatctacataccacaggggcaacatgctctagcggtggcaggtgatatcccctaggcccacaagtgacacactcgccagcaatgtcgcttgaattcatgaggtgggaatgtggcgtcacgatgaggagcaaggccaatccctgccttctcatggaagtgatgcggacataaggtagcacaaattctttttatcaataatacccctagccaataacaagcacctagatttgattggtatctcaagtaacataaaagaaaattttatgttgagggtactaattaagctccataaaccgataaatgaattttatagtaaagattaaacggtatcattaatacacaggtttaggtaggttctgtcgacgtttaatatcacgattccggtatttgtatagtatggagatcgttggtattaggatatatgcgagattgtagtaaaagagacaaggacgaggatttttatacaggttcgggcccctgaattgtcaggtaataaccctacatcctattggccgaagccggtattgctcttattcaccataatcacaccagtacaatatttgggatagcctatctaactgttgtcgacatggtggtctgaatgtctgactcgtattgacaacatggtagtcttcctcctcgaatccatgtccggcgacatcagagacagcgctagaaccctacggccggcctccgtaggtaccggataaggtcggtccagacatatctctgacgttgatatccggcggctttgtcttggcgtatgttggcttgtatgttgtggcttttgttgttccgtgtcttctatggtaggtgtgtcccctctcctcctagggggccttgtatttatacccataggtgtccccttgtccaagtagaactagaaaaaccaatatggatacaatccgagtagtcctcgtcgtttctacatagaactctggttgtctttccttatctggaacttcatccatatccgaggtcagtgtccgtataagacatgatatgtggtgggtcctgccgagatttaatcgactactattaggtatgtggtatctataaccctgacagattcaagggttgattctgctcttgctcttgagagtaatggtataagtatgtctgactataagaccgactggtcaaacagagacaaaaatcgaccatagtgatatgagagttgagcctgcattgaagaacttttcatccttcgcttgattaagatagaagccatgcatgtaggtggaggtcgccctaacatactcgatctgcgctcggggctgcgcccctaccatcggtggtggcgggttcacgcgttactcgacatctttaagttttgattagattgtccgtttagcttataaaactactctcactataacatctcgtactatgtttgtttattttgaaacagacgaagtaaaccggagtatcgttagagcagcagtttgccgtacgatagtgacggaatgcgttttgaattgtttggttggtttagggcccgtttagttccctaaatttttttctcaaaaacatcacatcgaatctttggacacatgcatgaagcattaaatatagataaaaagaaaaactaattgcacagttatggaggaaatcacgatacgaatcttttaagcctaattagtccatgattagccgtaagtgctacagtaacccacatgtgctaatgacggcttaattagtctcaaaagattcgtctcgcggtttccaagcgagttctgaaattagttttttcattcgtgtccgaaaaccccttccgacatccggttaaacgttcgatgtggtacctaaaatttttcttttctccaactaaacacacccttaatttggagtttggtgtggcggggcatgtgatgtgtgaggctgactggccgaggagcgaggaagcttcagctcccagcatccgtgatcgctgattgaccaccgcacgtactcccaccaagattagaggacacaggtcgattaattacgggtatctagtcagtagtcaaccatcaacatggcgtttgccctagtgaacaattaaaatgcatcgaaatcaccagtagctacgactgctagaggagagagtacagggctggaggtttgctacatatataaaatgttggtaatgccaaaacagttttaggtattgtcaatttttttaaacttatgtatgttattgttggtatattttggtagcaaatcaaacactaactaaagtattatttaaagtgccaataatttgattggccaaattttgacttcaaagcaaaataactcttatactcctatattagtagtactttctagaagtgcagcatgttggagtggtattttccacatggctcgtctgaactttctttctttgctttcttcttcttcattcttctgaaaatgtggatgatctgacccgtttttgactaaaagcatttgacgatggacatgtaatacttccggttaaaagtgctcgaagttcataactaaaacacgtaatcccaactcgtaaaatcccaaccaccgatattttctgaaacacttgctttaataatagaagaagtatttagtcaaaaaaaataatagaagtagtgatatacatatatatttgcctaaaaaactataatatcataaacttgttagattttataaacttatttaagtataaaataagttgtgtgtaattttataagtctcattctagatgtcaaatatttataactatagggaattaattttttttactaaagcatgattaatgccttaactaattggaacatgactattctctcatatattaagcacagaaaacatggtgatgatttcctcagctgtgcattactcttgatttggtaaataacagcacccttatttaatctttttgacagtggcgtaaactaagtgattcccgctctttgcgaaaattagtaattttcaatatattttttcaacaatcgagttaggagtaaaaaggaacacaaataatgaaacatcagggtttatcggtactaatcataaaacaaaccaatgatacacatattttgatacggaatatattaataaatatatattaagtattataaatatgatagatagataagttaaaatattgtagaaattatgtgaggggtgttgattacatatgattgtatgttgatttgtagaattcaaaagattataagatgatgttgcatgtgtttgatatttgatttataattattgctattggataataagagcaggtacaataatgggcagtggatgatacacataggatttttttgatgagctgtaggagagaggggaagacagaaaaaaagcaggtgactaattagtcgttcgactgtatgctccacccgaggcgcgggcctaccaggagcgatggccgatgggtgcacccgcccaagacgttgcccgcgtccgcggcgccgcacgctctacagccgtggctgccatcacgctccactagatcgtcgttgctgtcctcgttcgccatggctgtcgtcgccatcgactacgtccgccaccgccgctgccctcatccgtcgtgaccgccgtcaccgttgattgcgcccaccgtgcttgtcatcgattgtgtccgccgctagcgccctcgtctaccatggctatagtcgccatgaccatcgtcgccgtcatccggaggagaagaggtgagaggaagagatggggaaagacaatgggtcacataaatatattaaaatatctatgttacagtaaatttattgcataatggctatacttgctgcagatgacatggctatctattgcaatcagcagtgtgctttcttattgaccttgctctaattaatgtgttatggttgcatgttgagttttatacctagtgggttgtatctttataaaatataaaatgtatagatgtataatatgtcgctagtcaccgagccaacaacctttgaattcaatttgttacacataatgccaccgggtagaatgattgatacctgcgaggttagacacatgtagatatctagtgttggagagttcggcacggagtacacgcatctattactgggatctaacaaacactttcatcagtagtggtctagtggatctgcagctgctcttgcttaattaaccaaaagaaagtgcaatgtgtaattagttaggtcaggcttcacatatataccagccgtatgcccagccctctatctcttaaaaaaacccttaaaacatcaatcaaatacggtatatatagtaaactgtttttcctattttaaaaagaactttttttcataaatgtgttttttccctactaataacggataatcccacccatttattgcacatacaatactagagacatgccagtattttacaagttacaatagaatctagaagaaaatgagcaatggttttagtatacggacatctccccacgaaccacttcaaataaaattcacctaatttcatgaggtccatcatttagcggcttgtatttttaaacaaacgaggaggccaacaccaacataggcgagcaaatggcaggctccaccaccgtggtggccgtcatggggccccaccacgttgtcatcgtcaattgtggcaattctcgcgttgtcctctcccgcgacggcctactttgctgctagtgtgaacggtgaggttgacggtgccgaggaggctagctcaggcgagcagacaccgtcctctcctgcggtggtgtggccatgccactccgcttcgaccacaagatggagagagatgaggaagatagagaccagggaaacagaggggtgggtcctactgcaattaattttattttaaccgaagactcactgacatgtggatcctacgttttattttacttatttgtcaacgccatattagaagaaaccgctattcaaaccgttttgggattttatttgcactggttttgaaggttgagggacgtggcatacctaatatatgtcaagatttcatagtactatccagctaaaatcccttatattttaggacggagggagtattacggttcagggtcgattctcagactcggcgacaaattaagggatgccatgtgaacttattccaaggcggacgtaagcccagattcgtaaaggtcaaccggcccacaatgccgcgaccgttttccatccctcctcccctgaagaagtcgaaaccctcccaccgccggtgggcggtggcggcaagccggcaacggcggaatccaccctcctccggcggcgctggctgaagacgacagccatgcctacctacctgccttcctgcctttcccctccctttctcccctagctaggggaatgtgcgagagcagtctagactctagaggcgggggggggggggggggggctttttctcctcgtccaggttctcacggcgaaattccgctcctcctttttgtgcctgcgacgagcactcccgtatcgcgaatggattggctggttttctgggtcttatacgctgtttaattttttttttcaaactgccgccatacgaaaatttctgattctttttgctggaatgaaaatttctgattctgagcttcgctttctgtgcttttgtttcctgtcaatcacaggttccttcagtgaaaaatctggccgtgtaggtgtcgaaggccagagattatcgaagtttttgtgttttggtcttgtgaattttgcgaaggtaaacctcatatatctctgatgggattgatgtatgtctggggaatgcttcttatatttggcatgattctcattatctaatttttttttggcatgattctgatttctgagaccttgaattgacgataactttcccagattaatgttgggatttgcagtagtattacaagacatgttaaacatattaagtactagcatgatactggtaggaattgaaggctcatggccctaacatgagcatgatatatattcacccatttcacccgtatcagtttcagctttggaatcaggatactgtggtagttttgatggtgttcttacataacttgcctgcgcatggagcatgtctcgatccttactattgtcgatttaatttttcctgttgcaacatgaactcaaagcctaggatctagaacaaaattatcatctatttctgttttgttatgaatataactgtgccattgttcttcctatgctcgactccagaatgaaaaagataagttgcattgactaaaatctcactgaatacggtgcccgaaaaaactgttcacatgacctcctgattaaagacgaaaaatatacacctaaagccaacagtttgcagaaatatttattaatgtttctcttgaatgaaaatacaataactccttaaagtcgtcctggatggatcactgatgaagataatactaccgaggtaccttctcaattttcaaatagaaatgaacttttaaacctatttccccccaatgaacaagaggttttactgcctgatattatgtcaacacctgcttaatggctaattctgctcctgttaagttgaaggtgaactaccagtgtaagtgaactgtctgcttaagaatcccaaatgggtttttccaatgcagtggggtcaagagatgactgatggtaagagtagatatgttcctgaggtttctcctgctcatcagaatagcttaatgctgtcacatccgcgttgtaggtctcggaactcatatccaaagtcccactccctcctaaacccagaaagtcttgggttagtcctgcatctgcatctactacacctgaaatgttgtcctgtctgttgtgctgtgtctggttttcagggaaaatgctagggttatccttttcttctctcatggaaaatggatggttcattagtccaattaaaggcacagtacctggcctcatgatgccactggaccacggtgcgttgatcagaatattaccacggccaatcatgtaagagttctcatcttcagttgtcttcatgcaatcactattaactgttgaattcccaagggaatctccctggcttctagaagatatgttcatatgatctctagaactagtcaagttatttgggaaacttttaagaagtaatggcgaaataggatcctggctggtctttgctcccatctctgcagctttctgtagcaaggctgttgcagacatgtatggggagttcatggacatataaggataacttgtcacacttccatcaagtgggaatcctgattccttgggtgatatctggtttgagaacaatgtagtgttcctcgtaacgagagcataaggggatagtgatctcagatggctgtctgagttatggtcgttactagctaagtttgcgatcatatcagttggtgaagagctgaagctaggcactccatgtgaaaacatatcttgctgttgaccgtgcagacttccaaccattgttgccaggctgtggttaaccctagaagtgtcttcagctaatgcatcacagaaggctcggtgtgtgatgaaactatcctttctgcataaaatagggttgaatattaaaactgatgataaaaaataattattttaccgtgtgatcaaaaccagagtaacatgacaggagtctgaaggtaagcatagcgtattcttaggttccacttgttgcgggcatttcaatctttaagaatgttgcagttgttctaatgaattttcagttcatgcatctcgcatggaagcaacttattgatttcttttggaataatttctttgagggagcataaacctagtgtagccaatatttaaatcacttctactttaatgatttaaacatatttgtatttgtttcatatgaaagttgaaggaataacatgaagagagaatgttttgatgtttaattttcatcatgaaaaatgaaaagggagtctgatagcagatagtcaaagcagtaaaggacactggacttgagctaagactagggtctactggaggttgaatcagtacaaaaaaggagccccatataacacatccacgtgaagatagtattttttaaaataaatccatagattttttttaagtgttcaacttcaaactactaggggaaacaaacatagttccatgacttaatgggctcaatcaaaccctgccctgtgcaagtatgtaatactcaaggtctctatgcttttctcttctatctttagtccatgctagtgtcatggacggtgtacctaacttgtatgtcagattatataggttatgcaacaaacaattatttattatggacctagttcataatcatgagctattttcattgagagccactcgtgcagaagtatgagagtaagacacacctatgtctatggagttcttagcatgatccgcatgtagtcaaacatagctggtataactattgtggataatgtagttggctataagaaagataccttgagaagattgtcccacagtcacatcggtactccttggtgccacatatctttgtgtgagccttccaatctgattgaacagcatacttctttgaacacctgtcgcacttccacttcttctccccatgcttcctggagtagtgtttcttaatgcctgtgagatcgcccaaagctcgggttgcatcatgatgagggcaggtaatctcagggcagacatacaccttcttcttagcttctgtgctgcttctctgcttcagcttccatggtaggttgtggcctctcctatgaagttggaggttctggtctctctggaagcccttgtggcagacctcgcatatatacctgtttgttgccaggagtgtcttaggtgacaaagctacgacctcaacatctggatctgcatatgaatgattatgaattaaatgttaggctgtcaaacagtatatgttccaagataacattatcatcacctaattttcagatcaactcgttgagatctagtctacttttctgccatggctgtttcacgaattacaatgtcagaaaatgcaagatgtggttgttaattgttatgttctttcttagaaattggttacaaccctgcctctacatccaaatggatctacacaaccaatatatacatatatatattagatggggttgttatctactatctatccattcagatttctttcctgcatatatatatttcaaatctttagtgtgattgactttgaaatttggtgcagcactcgcaaaatactttcaatcataaggtgaattgtttaggcatgtatattttattcctattaataacatgaatttgtcaggtaactaatattaatatgacatgacagcacaagtttcttagttcatggctaaaacggcactgcacaagaacatattgagtttccagttctgaggatcagaggtgctaaaaaggtatcattagattaataataagttgggactttccactgagtttttagtttaaccttagctgatctttatcctttgtctaattcgtagccaggtgtaaccaagaaacacaattattgttttgagcattgctttgatgcatttattatgtcacttgcacagttgcacgtgtgctcatgaaatcagacaattatcactcgaaataatgaggttaggactgttgaccagcattagttgaaaaatgatattatgaaatgctacaataacaaacgctttgttaggaaagatcgaagggacgtacctgggtttcctgggtgacctcgtctcttcttcaccacaggcatgacagtgtcacctttgcttgatccagcagcgcaagcctctagcttcggttgctgctggaggttgttcaaggattcttcctctgatgtgtgtgacattgtttggaggctcagttagtggttttagagggtgccagtaaagtgaggagggttgatgatttatgcacaacagagtggagggactacaactggacaatagggaaatggtgaattccctttcagtcaccatcaaggactgcaaccattagttttaaatctgaggaacacgacgctgattgtttcgtcagcatggaatgttctgttcattgttcctgattattttgtcaggatcactggagtttcctgagtgaagctccacatgaagagagatatcgagccttgagttgcatgcctactgtacgcccattttgttgcaaattataacagtttcatttagtgtgcgctatgagcgacaggtcgatatgatgaccatttggggatctcaaagaaaacacttcactgcagacagtaaatctgtgctactggacctttatttttctcctgctgtgagtataaatctgaacaccttgtaactatcgacacgaggatggaattcatgtcatatttcaccgcaggtgaataaactagcctgtcatcgtcatgatcattcgttggatggataatttgataatgttgttttcttgggacaatgtcactttcaggtggaacaatggctgtgaagagcaggcaggaggcggttttgtcggtacaaggaaggtgatggatatgacaagggggagatccgggaggagagacaaactctggccatgttctttttctaaccggcatccatggtatctccctcctctgctggcacaactgtcagacttgctcttgttttagtgcttggagcatggtggtacctgggggctttgaaggtttccacggcatgtcatccaatgcagatactgagaccggagagaggctggaaggtatgtcaaatgaaccgttcaccgatttggctacttctagttatctccggtctcagcatctgcattggatttgtccagagatgggtttttttggatttgctcactgacctctccatgaacttcatatgttagtttaagtacattaacagcttatatactcttcaagtcatcatttttccctattcatggtaggatatacaatctttgctaatatgaacctgtgaaccaatccatggcaccacttggatttgcagaaagcaaatcattaggaagtgttgcaggatctctgatcatcatcaatctggagcaagctgtgccttgtttcatttttccctttttcaggttaagggtgtgtttagttggggaaaaggaaatttttgggtgttacatcggacgtttgaccggatgtcggaaggggttttcggatacgaatgaaaaaactaatttcagaactcgcctggaaaccgcgagacgaatcttttgagactaattaaaccgtcattagcacatgtgggttactgtagcatttatggctaatcacggactaattaggcttaaaagattagtctcgtgatttcctccataactgtgcaattagtttttctttttatctatatttaatgcttcatgcatatgtccaaagattcgatgtgatgtttttgggaaaaatttttgggagggcctgtttagttcgcgaaaaaggaaatttttgggtgtcacatcggacgtttgaccggatattggaatgggttttcggacacgaataaaaaaactaattttataactcgcctggaaaccacgagacgaatcttttaagcttaattaatccgtgattagtcataagtgctacagtaacccacaggtgctaatgacggcttaattagtctcaaaagattcgtctcgtggtttccaggcgaattctgaaattagtttttttattcgtgtctgaaaaccccttccgacatccagtcgaacgttcgatgtgacactcaaaaatttccttttctccactaaacacacccttaaacatggcctaagtttactgtccagtgataaggaatgtactcgtaggcctgttgatcggttcaatcactgacaccggcaactaaatcgtggacagtgacaagcaaagcgccaaaagacgtcacccggcctgccccatgcaaacaatcctggacagtgacccctgcattttgaacgtactgtttcaggagaagcgtgcgactatagacatccttgagttcctgacaatgtgcatgcttcttactacctctttcccattataagtgcagcaatgattttccgcgtccaactttgaccgtccgttttatttaaaaattttttaaaaaaattaaaatcataaatcacgagtaatgtactattcatgttttatcatctcataacaataaaaatactaattataaaaaaaattaaaataagacgaacgattaaagttaggcgtggaaacttatgattgcacttataatgggacggagggagtactatatcggtctcaaaataagtttattttttacaaatctcatactccatccatccatccatcctagaataagtgcagttttgtattattcatatctaacattagaccatttgtcttatttaaattttttttataattagcatttttattgttattagatgataaaatatgaataatactttatgtgtgactattttttaaaaaaaaaatatatttttttcaaataagatatacggccaaacattggacacggatatccacgactacacttattttgggacggtattttggaatggaggtagtacatatcaatactcctaccaaagtaaaaagacaaatatccttactttatcaaatcacaggacaattgtctttcactttatctagttccaatgtaaacatcccatactttacaaactccaatgcaataatttttgagaaatgaacttattttgagacaaacaagagaggacaaatatgatcttattttattttagacgattgatacacggttacagtgtcagcttgcaaaagacaaacatatgcacacgcatcgacacacacaacaaaccaccgataaggacagcatgatcgtcgaaggtctttgttgctccaagaggcatgcatgattgatcttcaggtcttaatcttttgggtgaccggctgggtatcttgttcttctggagttggaagttgcaatagatatgagattttggagtttcatcttcttgcccccaagagaccatttgcgcaatcagtaactactaatagtgcttcatttgctaaagtagtagtactagattttatacatcattatatcaacaaagtgtactagaaaattataacaagccctaaaaataagacaagtgagaagaaaaaaaaagaaaagaaaagacaaactctaaatctcataggtgatcccaactttgagcagctggtccttgggaacggacagcgccttgtgcccttccctgaggtttttcctcagtaatgtgtagacgtagttgacgacgatccgcttcatcaccgacgaccccgccgccgccgtcacgttcgcctcccccatcaggtacaccaccccgcgctccgcctccgcgtcgatcacccgcttctcctcctccgccatcgcctgcgcccgccgcatcgcgtcgtcgtcgtcgttgtcgccgcggctgcaggcgaagacggactcctcgtggacgaacaccttgaggcggtcgaggaggaacgcggcgaactccttggcgccctcgagctggtcggtgtagccgtagcgcgccacgcagcggaacaggcggtggccggcgccggcgtcggcgccgacgacgcggcggaagatgaaccgctccgcgggcgccacccgcgggacggggaggtgcttgatggacatgaacacgaacacggcgtgcacggaggggatcttgtccacgagccgcgggaacaccggcgggatcccctgcacgagctcggagtagagcaggccgacgccggggacgcgccgcacgtcgcgccgcgccagcagcgccgtcgtctcggccgccggcacgacgcggtccagctcgtaccagtaccgcttcacgtggacgtagtgccacgtcgccatgagcgccatgagcaccagcgagaagcagaaggggaggtacccgccctcggcgaacttggagaggatcgacgagaggtagaggaactcggcgaggccgaaggcggcgtagaacgcggcgatgaacggtagcctcaccttccagatgagcagcatcaccaccgtcatgaggtgggtggtgatggagaacaccgtgacgacgcagatgccgtaggcgttgccgatgttcgccgtggtctggaacgccagcgtgacggcgacgctggcggcgccgatgaggaagttcacctccgggatgtacacctgcccctcgtacttgttcgacgtgtgcaccacctcaacccgcgggaagcaacccagcgacagcgccttggacaggatggcgaacgcccccgacagcatcgcctggctcgcgatgatcgcccccatgatcgccaccacgaacaccggccagaacagcggcgctgcacattgcataatacagaccacccatcaattcacacatttctgacgatcaaatgatgcctagtttgcctactcctccaaacccattctggctgaacaactgtacctgggatggatctgtagaaggtgtcgccgacattctccgggaatttgcgcaggtaggctgcctggcccatgtagcacagcgcgaccgaggggaagaggacgcaagtgaagctgagctgcaggacagaatgaacaatgcagtcagttgtttcaattgtgacaactgatgacaatgtggagaaatggaattatggactacctgaattgccctgatgttgaaatggccgaggtcagcaaacatggcctccgtgcctgcgacatttcgcaaatgcgaagaatcagttccccttcttgctcagtacttttctcctttgcaattgtgcagtgttcggtaataccgagctcacctgtgatgcagaggacaacgcccccaagggagacccaggcctccttgccgtttctcctgaagtagtcgacaatgtatttggggttgaaggcccggaggatggtgatctcgtgcacggtgaggttgtacatcccgatgcccgcgatcaggaggaaccacactgagatgaccggagcgaaggtgtacccgaccttgtcggtcccgaaccgctgcatcgagaacagcacgaacaggatggccaccgagatccacaccacttgcgctgtaacaaaaacgacaagacaaaatatttcttttcagataccactctggagtctgaacaggcttgacatgtactagtattacacgttaaacctgaaactatcaaactaagtactccagtgttttggtgtgctcacattgtgtcaggtttggtgctttctccctgatcccactcaccgcagacagcactgcaaagaggacatcatccattggcaacaaattagtaccattctccgaatctatctacatttgcacacataaatcgaatgcaaaaaaactgatctattgataccagagattgctggtgtcagtgtcccatcacccatgaccatggaggtgccaaggattgtgatggtgaacagtgctatcttggctgcgttgctggactccagcttctgcttcacccactcagccctcctcagctgcgagcttggcgcctcgatgctgtaattcgacacgttggcgtcctccgtctggtcgttcgggatcattctgatcttcgcgtgccgcgatatcagcgagtacagagcgaatgttccacctgcagtaagttcatgtcatgcaattcacccaatgcaataatgatcacaagagattgagaatggtgatgggctgctgcatctctctgaatttggcaggatggatggatgtcagtcggtcggagagctcaccgtcgccattgtcgttggcgtagaggacgatgaagacgtacttgaccatggggatgaggatgagggtgtagaggatgagggagaggacgccgacgaggtcgtccgggtgcttgatgccgttcggaaacgtgctggagtagacgtacagcggcgacgtcccgacgtcgccgtacaccacgccgatgctctggaacgccagctgcagcgtccgcgcccagcttccctgccgccaccaccaaaacacaacaaacaccatgaacaaacgaactcggcgtcagtgtcagtgtctgtcactggctacgagagagatgagttggtcctgaccccggcgccatggcgcttgttgttggagaccttctcggcgtcgccgtagagcgagtcatggcgccggagaacgtccggctccggcctggctgcgccatcctcctggacagacatctccttcaactgatcagcttgtgaagatcgatgttgaagggtttaggcttcagaacccctgtgccctgcatcatcaggaattcaggatactagacttttagacactactaattaattctgatgagatcctaatagacaaccaagaaatggtaactaaagagatggaatttgatatctatatacgcgacgatatacgcggatccaaatccgtatggttcttctatcgtaagtcctcgtcactgaaacatgtcgtgttgttcgacagagattttgagaacactatcaataatgttggagatcttccttgtcggtgtttttgtcagaagaaaccactaattgttggatcgaagggaattggcacgtgaaaatgtgacagggttgagttctttgaggaaaacaaatgtggcttaatttgactgaatatatttcagagtaaacagcaacatgcacaattctcccaacgaagaaagtatctggagaatgatatttcagtaataacaattattattacaactagagtgttttgagaaatgttcttccagaaaaatgtttcagaagaagaagatgtcaagatgatgagaaataaaatggtgaaagatcagcagatcagagaactaaaaaggaggaggtacccgggatccgaaggagaggctgcaaaaacaaagctaaaatcccctcatcttccagaatagtaaatcccttatcttgcatctttcccaccttataaacacgcagaacgccactccattcgccaaaccagacgccatttgtctcaactactctttgtcctcctggagaaaccaaactctagggcctaattctggaggagacgtcatcggctacctgcctcctctggttgtctccattgttgaagagaggaaaccctctctagtctcttcaactgcagcagtttgttgcggtttctatgatgtcgcgtcttgtcaggaaaccggagaattcttcctgcatcgggccatttttagcttgtgtgccatggcgtcccattccgttatttctttcttttctttctttcttcctttctttctatttaaggggaaacggaatgacgtgtcttgagccaccagggatgaccatttgtcgggccgggctctgagctcagcttcttttgggctggaaattattgcctacgctttggcccagcaaggggtgttgggcctagtatttcaggccaggctgccatgaaatttgcactaaaataatttagaaataaaaacacaaacaaatcggatcccaatttatttggggctaaaccaactctttttattaaaataagggactctcttacaaaaaataattaaaaaaactttcgaatgtaacaatactataatagtatattgtaatataatttcactatgatcatactataactacaatataaattattcattgataaaaatgactattatctatttaatttcagaaataaattaattagttctaagaataaactaaacaagcttagaaaatatggattaaataatacaatagaataaagttctacgggaaatacttatctttggaggtatggagaaataatccgtgataataatgtagtgaatcgggtgaaaataatagggcagcctgaaactctcctctcatgctccaactggtcatgatgattatgcttagttagtttgactgctaaagacaaattttctttctaatatacctatgtaatatttgtaacaaatctctatcgcttcagtcacttttgaactgttcatatcatgctaaaatttgtgagattgtagtaaccttaactttttctcgcccttcctttctctcatatgtgaggcgagcttgtgtatccttctagccattgcctggacaccgtcactcggccttactagtgttggaagctagacaccaagtcacaaactacactggcagctaggccttgccagtgacggatccagaaaatcgattcgttagtgtcataacgtgtctatcggtgtcataaaatgctaattatacttagatcatggtgttatgacatatggataaacagttttgctataggttttgccgaaagttgtcggtgtcgcctgacaccggccctattactgtagatccgcccctgggccttgcgaaccgtcctcctccccctccttccaaagtcagctagtgtatgcctcctccgttctagcagtgttgccgtcacctcaccctgcccaccatcagtttaatcgtcactcacgaccatttctgtaagactgaagaaacaagggtttccttctctccagaccctttagttggattaggtcgtctgccaagctagaatcctagcggagctatgggaggttgggcacaactcttaacattggatccaatggtggacgaaatccggataaaatctttctccaattttctgccatataaccaaattaattattctaatggattgtggattccattgggattgcgcaagtcctttgccgccgtcatgttcgtccgcgtgtcccgatctgagccgtccgagagctgatcagacggcgacaaactaggattcttgactgggtggctactaaagctagtgagtagtgaccgaccgactgactgaggtctatacaaacctcggccatatctcaatcaagagtcctgacaaattaattaaggtgcacgcatgagaccaaatgcatgcccagcccagctagctgccatgtgtgctgcgctgcaccatctaacccaaactcccaagctctcaaatccctcttgtttaatcactggctataattaattaaccaaatcacgaatcggttaaaagcgtaagccaaatcaagagtgcagccaacataatgaaacgaatgaaacccaacagaaaagtaactaattgacatactatatattttacaacagaaatcaaagatatatatatatatatatatatatatatatatatatatatatatatatatatatatatatatatatatatatatatataaataatagccatttctattattaaaaaacagcgagaccggttaaagatacgcacctattcgatgattcagaagaaacgaattgaaagcacacgacaacggcagagacgccggccgacacgccgccggccggccaccttcctccgccgccgccggtcggtcctgtagatatatatagctaagaggaggaagaagatagatggaagctagatggcctggtcggctttaagtaatagagagagcttcagcagagaagaggagaggttacacgtgaagagagagcaaattaaagggcgatccaggaagagtaatagtgacagctgaaacgggaaagtatagcagctactactagctagctatagttagtgactgtcactagcttagctagctagcgagactttgggctagcataatcgtcgtttcaacccgattttgctagctaatcaggtgacaagcggtgacttcttttccatgaagtaatcacgaaattaattagtgggggtggattatgcaacgtgtgtaagaaaagaaaaagaccagcttaagttgtcgtgaacacatgatggatatcggatgggctatgtttctagcttagctaataatttaataattcgatctcgtcacatggcatacccgtgtgcagtgtgttatagttgcagcggcgggacagtgtggctcaagtttacctcttttatcgttttttcctaaagtagtccatcctcttctttttttattccctttcatatgcttgcttatagtccttaatgtataacttcaaataatcttatttcataaagtatttatctaatatgtaatttgagtataccattgtattcatcgcaattaaatctttacaacaagattttacttgactatattttttttatttttttgttgtaatggattttttaatttttgcaacgggtatttaatgatgttttcgctaggtcattttgaaatgttacacagggtgttttttaatgtttcaggaggtattttgtgatttcttcggctgatgtttcacgatatcatttttgtaatggtacacatggtgtttttttgaatgtttcaagaggtaatttgtgatattgtagctaatgtttcactaggacattttaaagtgttgcattgtattattttgatatttttctaggtattttgtgatgtttcactattgcatttggaatgttccatgtcgtgttctttggatgtttcagaaggtatttttgtgatgtttcagaacgtatttcactagctcattcgaaacgttgcacgtggtgttatttgaatgccttagaaggtattttactagttcatttgaaatgttgcatctggtattatttggatgttttagcagatgtttcactaggtcatttaggttgttgcacgtgttgttctttcgatatttcaacgtgtattttgtaatgtttaagcggttacaaatcaatgttatatttataatatagaaatgtttcaattagtaatataaatatatatgctttatttatacaaaatataatcatgtgagatctctttgtaaagatttaactgcaacaaattcaacggtgcaatcggatcacaacttgtatctaaaataattattcattctttaatccgattacaccattgtattcattataattatatctttataacaagatatcacatgattatattttgataaaaaaataaatgttgtttcaccccttaaaaattgtttcagttgtataaaatgttctaaagaaatgtaacattaaaaaatatcgactgcaacagcattaaccacctatatgaaacattgagtctcagatagcgaaacaagaaaagtcatatgagatttacaaaatattttaaaaacttgatattgttcaaatatttttatatgactaacgagtattaaactataactatcgaaacattattaaatacttagtgaaacatttaaggaaaacaacgtacaaaatttgcaaattaactaatgaaacaatatatgtatactagcagaaacatttaaatataacatgtgcaacatttcaaagaaaaccattaaaaagttaaaatatttttttcatcgaaatatatgcatgtgtggtcttgttttaaagatttaattgcaacgaattaaatgatgtaatcggatcataaattagagaaataatttaaaagataaactagtttaaaaattggcaaaaaaaagtcttatacctaccctactagctcgtactaccctactaagcatgcatgtagctactagtaactggctacagcatatctcttcgactggtataattgcgcatgtgacagaggctgagatggatgctcttgcgtgtgacagatgctgagctgggcgcgacgtccgattttgtgtattttgtcggacgtccgacgcgtagtcgtctccttttttcccctctactcagcgatggtagattaattgcatggtggaatttgtaaccggtattttctccatcccaaaaatactttacttatactagcactactaaaaaaggtcacaccttttaatttactgacaagtaaaataaaaaacgccagcacatataaaactagaggttcctagttagtgaccatcattgaaaatctattttcgcaagcgggtcgtctcaagagatccgctattaaaagttatactatttttgcaagcggacctcttaagtaaccgtcaacgaaaattgatttttgctagcggcccctatggactccgaaaggcgccagtggggaaggaggaggagggagagggagacttggagagggtggaggtcaggtgtgggcgtggagactgttaatatgattgtagtttttcatgggtggcgactctcgtgggcagcggatccggctgtgagtacccacgctggttgtggattcgacggccgcgactcaggctgacccctcccttctccgccacaacggtgctttgctgaggtgtgcgtcatctgtattttttttcctttttgtatttgctcatcccgttctcttccaaatacatgttgatatgatgtagaatgatttgatttgtattttatgtttgatatttggaaatggaaccatggaaatgggcagggagctagagtgatttgcattttgtgtttgatatttggaaatggaaccgtggaaatatgcaagaagctagggttcctgggaaagcagggtttctggaattatttttgtcgaaaatctataactttgatggttggcttaattgagttgcttgtgaaatatcgattttcgttgacgttgtagaactgtttgtgaaaattgccgattttcactagtcctcaattgatggcggggcttctagccactagcaaaaatgtattttgaccgctaggacaaatcatttgttgtagcgtagcatcctttagttgtctcacaagtagtttatttccacttaaaatacacacatttaattggagcattggaattgcaatcgtatgattaatgaggaacatgttatttcatcacactatatgctctgttcagcaacgctactatgaagctgtaacagctgtgctgtacagccagccttatatactttctctatcatgtactgtagtgcagctgcacagcagctacaatttagctgcagcgaatagacccataatttgtcctattagcactctactaaaatctttttaggacgaatggaacaacgtggacagcttaaatgtgatggacagatcgtcttcgtaaggaaactacataactatatcattagtttatacagttgtgtcattgatatataaggtctatatcattagcgtaacttgaaaccagtgaagtcagagaagcctcgtcgacgctccatgggacctcacagctcgcacaaaaaattccagtgagaccttagagcaagtttaatagtgtagtctcgtgggacctcacagctcgcataaaaaaattctagtgagaccttagagcaagtttaatagtgtagtcttctaccgatagtaattttctccatgtcatgttatggttagtgaaatataatagattatctataatatggtgggtcacatattactattttattattttatgcacattaattatctctcccgtagtctcgtgcgcgcgcttttcttccttgggtttggtgagtttagcatgcatgtatagagctcatcttggtttgcgtgttagcttggctacaaattaatctcccattttctctccttcaactcatctatataactgatgtgaagcttttatagcctgctaatatcatcttattgaacctgcgctcctagcatagatcgactggattatctactctagccccgtttagcagcatggctcttgcagttgggagttggcacaccagggctgacctgacggggtcctttcacttttgcttctcgattggtacgcaacgccggctaggccagagacgcgagtacgtgacccagaaacgcaaacttcaaaacgaaatcttcagttatcgaattgatctgaactcttcaaagcttcagctagcctgcaatttaatttctccagccgtgcctgcaattatcgattgggccttcgtttggtgtgaaagatgccgtgacacagcacggcggtgcccaatcctgcgtctccttttttgaccgtggctgctcgtgaatctgcgacacgagatcctgcggactggactactcatgcatggatagcgtttgcctcttttcactcacccaacagccaacaactatctggcctggccagagcctattagagcaagtataatagtatgctataaaccggctaaatgctgaggttgaagagagaaaagaggagagagaggagaagcagtctgtaaatttacagccggtttggatacaagaaccaataaactctcgaagagagacaagtgggccctgtattaatggtaaagagctatattatatagacaggctgaaagaaaactacaaagaactttatagccaacaggtcggctgtattattagtctggctcttaacggcacgtagctaaccagtgtccactagatcaaatataaaaaccaaacttattagaaattgaatagaaggaatgttaaaactaaattctttttaaaataacccttaaagtcataattcttctttctatatagttggtacccactaaagtcataattgctataaaacagcttctgcattaagccacatcatcaacacttcatagccgtcggatcaagtgccataaaaaaagctgagccgttagattttcatttcaagttgaactttccaaaatccattgaggtataggccctctgctatcccatgcacgctgctactctcgcctaccaggcctcgatctttcggtgaaaattgattgcaaaacctaaaaacaatgccataaaaagagcagttgaggagtcgtgtgtttcatattcctttttattatatattccacccacgtcccacccacgatcgttttcattctgctgctaacccaagaattcgtcgcaattaatcatcgtcctacactgacccagaattcacacagtcgtcatcgatcaagctacccgtcaccgtgtcctataatagcccaaaccatcaagtgccttggcgtagctagctcaatacacgatcaacgcgcttctacaacgggaccttccgcttctacatcgaccaagaacattctttcgattgcctgattcttccgcctcaacaattcaacgtatccttctgatcataccacaccgatcaaactctctgctatcctatgcaaaaagttaaccccctgattctcccatcttccatctgagtttttgtgcactatatgtctttcgtactaatttcttactgcactcatttatgtttgttgctgcataatttatcctttcgcacttgctatcgatatttgatcatgtctgatgtttcctgccattaattatcttcagtttcaagctaaccagctctgaacttcaagtaacggcggtagacagcgtctacagattctgctcgagaaaatgttgcttccacaagacacggtatgttttcggagagcgctatggctcggacgcgtccgatgtctcaccaaatatcggacgcccagccaggcaacgagtacatgtgagaaaatgctgcaaatcggcagcctggcggattggacgaaccctgtcactgtaacatacatgtctagctgtttcttttcattctttccacctctctttgaataatttttctcctaaattacttatccgatctacgaaccgatcacaccattgtattcgttgcaatgaaatgattatattatgtcaaaagaaaaacatgtgtttcaaaccgttaaaacaaaatgttttatacatgatagtgatatgtttcaatatgtgtcttcagtatgtttcacaaaatccctaaaactacctgctatactaccctgtctctacctcatgcatgcatacatgcatgtattttagcaaactttaaaatgatttttcttttaaattacttattcaatctatgatccgatcacactgttgtattcgttgtaattaaatctttagaacaagatatcgcttgattatattttgataaaagaaaaacatgtgtttcaatccgttaatactcgttgtttcatgtgtgacagcgacatgtttcaatgtgtatcttcaccatgtttcataaaatatttaaatgtttcagttgctgatttttttgtttcaccatatataacataatgtttcacttattggtcaactggcaacatttaaccgtccaatgttttggggcatcggacatccaaaacatcataaaataacctagtgaaacatcatgaaatacttattggaatatcaaaataataatatgtgcaacaccaagaaaattaatcactaaaaagaattttttaaaaaagtcaatggaatattatcatgtacgatattgttataaagatttaattacaatgaattcattagtgaaattggatcatgggttatgtaaatagtttagcaagaaaaatcagttgaaggtaatgagtttctttttttcatttctttcacacagtgaagctggcagaccactgtacttggcccgcgagtgtccgatgacatcatatgtacgatggcaagcatttccgtaagttttctgatgcatggcaactgttttctatatgagttttcaaagaaaaaagtcaccactacaataaaatttcaattttacaaccatttatttctaatcgatttcgtcatttgtttcaggatgctgctaagggctatctacgaatccaatctatataattccttggctttttgaaactattctcgaattaagcatttgctacttgacaaacctacttgaatgctctgacttactccctacgatgcttcacatttcctgctgcagtggaattccgggataaatttcatagtcaatttgaagaagtgtaacactgtaacgtattatattctatatcacatctatactaatataaaaaagaggagttgtacctcccaatcctaccagccaaatcatccccccatcatctttgtcctcagccgtccgatctgttgatccaacgactcaaaagcgatctgggcgtccaccccttgcgatgcaacggtgaaatcaccgatcccaccgtccccccaccgcgcaaatccacacccgcactactgccaccgcgctatctacgccaccacgctttccccgcgcgatgactccgccgccgcgcctcctcgctccaggccgtcatcgtcatcgtgcggtcccgaccccttccgcatccccccatcctgcctcctccaccgcgtcgtcgtcgcgtggtcccggccggctgtccaccccgccgtcccagatccagccatccctcataccggactcccccatcccgacgaccctatcccagcggcgagtcatcgtcgtcgcgcgggagatgaccggtggggagagtgaagagggagaggcgacatcaaggaagaagatggcaaccctccctccgccacgctagctctccaatcccccttctcagtcgagccccgcatcgtcaccttcccccgccgatgccaccacatcgaggcacctcgcgcatggagctcggtcacatcgtcacctccgccacatcaccatcgcagcgttcactctttccccgaagccggacgcaatggccggtccctcgctaaggcacccagcagatccggtaagaggatctggactcttctgccaacgaggccactgtctgaaccaccatcgtagggtattttttccgttgcctgacaccttgcttttgcttactaattggatctgaatgcaccacatatcttcccctccagaaattattttttccggatgaaattgatagaataccaatggctattgcaacaaggtaattttccctcaacctttagcttttcaaattagaatcaatttgattacttctttgtttctgcgcatcattttaccctaaagactgatgcttgcactgatgtagcatgttgtcatgggggatgatctagacgtgaggactggcaagccatctcttgatatatttcttgctgagatgaggaggttcgaggtattgccatgtaagtgctcttgcctataatgttctttagactataaacacaatattatattttacctgacacaagtgcattgcatgttgttcgggtcaatttggaaccagtaattgatttgtatttcaagctccgtctgctgtagcagcagttaaaaaatgctggaacgtgactttgctcctcctcctcgctcctgtgtactgccgccgcgctgctgcatcctagttctctgtccgccgcggagtcgaggtcccctttcgccgccatcgccgctgccgctgcccacaccgacctcttctcctgccgccgccggccccatccgccgcggtcggcaccgagggcggccccttccaccgctgccgccaccaccatcaccgcggtgcactccaccgctggcgagccgatgtcctccccattcgccgccgacgaagccgaggtcgtccctagccgccgccactgccgccgccgaactccaccgctgccacaggttactgccatactatactgaaaaactgaaaaagcatcacaaattttctccagtggttgaattatctccaggcaatgtagttgaatgtctctggttaacctaactgtcacaggttacatttttacattttgtgacttcctgaaaatgtctgccaaacaaccgcatgttacattttgtgaatttttcgatgacttcgaatgtatttcaatagttataaaaatttttaatcgaggatatatatataaaagaatgaatgttcatcgaattagagttgatgacttgacaaggttgacttaagtttaacacatccatgtatagatcattctgcttgccactttggattgatgtcgtctgcactttatacgacctttggaacgatagtatgcttgggagaccagggaatggtactcatctctgtactgaaacaatttctgtgactggttttcattctgtttggaccatacacaaccttttcagtttaagtggaaagtaaatcaattattgtgtcaatcttctggtcacctgtgtatatcttgaggtttatacatattataaggtcacatgtttatgtcttgagatttatatatatttaggccaatgtgtacatcttcagatttggagtgaataaaactttgcaatatccatgtatatgcctctcatcaaataaagctatttgttttgtaagttactgaatactgatggcacaattttaatttttacttggcaggagctctgcaaagcatttccatttctcagtgtttcttgtttaccactttgccactatataattttcaagtttcagaagcttcttgagatattattgtgaggtaataatatgttgctcatgctagcagctgagaactctgccatctgaattaaaatttggtacatctccatctaatcccatgataaatagtgataacctatttctgaaatatttagatcccacgcttttttaatctcaaattatgaaaccctgtatatatacattcaagacaatttcctgtccaagactatgctgctacatgatgaaagaagaaaggttgataggtctatgtctagcttcttttggttattcaactaagatattaggcaatagtcttatcttatttttgatacaacaataagtgacttcatgttcacatttttttacactgaaattgattgtgcaacctagatttctttgcagttttaccggcttgttcatacgatggagaggatagtgtaagttcagacccaccaaatgcgtcttttcctacctccacccccaagacaagttttgtattatctcttcgagcctttctgttgtagcaagctgattctgattctcggtgagttcatagatatcgaggcattcattgagtatgtttccttttgcttccgttttggttcaatcaattcatacaattggtgcttcggtatactgctactcatttggcacccttgtggacataaatttgcttcctggttccacattcttcacaaacatatgcacacaagctgtttgtacaatgcttggcaagatgaatctttgtgattatagtgtatttgctatttgtgttatcaactaactgttggcagaatcgctggtaactgtattgccatggccctgctcaccagtaactgtattgccattcaggttttagcccttggcatcttccaagccattttgctttcacatattcagaattgactgaaattcatttatcgttacaactaatgtcggtgatcagttttcctggaaaatatttgttgaaaatatatgtaacagcacccaaatgtattagggtgtggaaaatgcttcaaactaaggctattcagacccatattcacctatttacagtgagcattagggtcattttatagaaaacgttgtcgaggagatctagaagttattataagttaggtctgctgcttcattataatagatcatatgtgtatttctgaatatatcttctgtggcaagctgctttggcaatcccagttgctgtccagagtaaagattttcatgtggcttgcgctaaagggcagatgcctcatggctgacaatctacagaaaataggtggcctcatcaggcgaattgctccctatgcaacctggcatttcgagatgacacccaaccttttgttcaatgtgcttttacaaacaggatttggagattgctcaggagctaagtgaatgttggctttccgcttccaagtgacctcaatgttgacttggctgattggcggatggcttcaaggagaagcttcagagattgtctcagaaaagttttcgatactctcttcttcttcagagattgtctcaggaagttgtatggctgtgcagctctttggtgacatcaaagaaaaaatcacaatctggagggaggcaggcttcatggtaggcgaaaaacgattggtattattccttttgcagttttttctctcccgctctttgtaaccggtttcgacagcttcttgtggatgcttagtttgtaacaccatcttctaatcttaatgaatttgctcagcctactcttgggccagtctggctaaaataaatgcaatcagagttatacttcatttgtcggaaacataacttgtaaaaataaaaccaatcatttttatcctaacaaaagactgctcaatgctgcaataatttctgttgaaaaaggaagtggcaaaacagcatgtcttttgctactttgttctgtctgtttttcttgaagcattctctaactttattgtgatcagtcttttgaaaaggctatattaaagaaatttcttattttgtttaggttctttctatatgcaaaaattaatagctctataaattcaatagctaaagagaagcaatgttcagaaaagttgaatatgcacttgatatatatatatatatatatatatatatatatatatatatatatatatatatatatatatatatatatatatgttttacctacaaattcatttttatcctctaatataccgagccaaacgatggatgtaaatgattaatcaaaatgtggatgtaaatgattttttatttagttcgcagaacaacgtaaatgaatgttttggtagaaaatggcgtttgtaaacacagcaatttctatgtgataatgttcttaaaatatcccaagtcccctaaatcatagcaatctatatttgagagctcattaattaacaagaaaccggttgaggttgatgtgttggctagaaaatatatatagccggccactaacaaataaatgatataatatagtctatttattttatattaccaaatctagaggaaaataaagaagattcaatgtttacttgctacaaataaagaagattcaatgttcaatattacgtaagaaaagttctacaaaaaaagtcaacctaaaatgcactacacgtaccaaaagaattcagattgaaaactatcaaaagcaatttacaatgtcaaatataatgtaaagaaccaatattactagaaaaatataaattacataagcatttcaatttctatgttggttctaaatacaatcctcagtggtgtaaacttttaattcaaaaaaataaataagtttataatatgtaaatttataaaaataaaaattaaataactgaattttttcataaaggtgttgaaataatttcatatgaatattttaaatcaaatctcttaaagttgtattctggaataaagggttgaatacaagtttcctaaatgtgagattttttactttgataaagccaagtaagtggaggatactatttgattgtaattctggatccttctcttttagatatcttggtattttcattcattattaaaaactacggaatgttgattggaaaggagttgaagatagatttgagaagaaaggaaaaaacatgtcatacggtgggatactagttatagaataatgtaacactgtaaatgtaattggttcagcaaagacccagatctcaactcatttgtactatatactgatactgacagtagttcacatgattaatgatttattggtttgtggccaagtgcacttgccaaagtgtttctaaagttcaagcgtcatcagaatgactgcatatagagtttgtaaccgataaatcatagttattatgtggaaccgtgtgatttgatgtttttgcagcccttaatttcttttctttcactgcgaacattttgagcaattagaacaacttgcgttttcttattgtgaattttgacccgaacgaacagcaggatatactccgtaacaactctagatccttacataaatagcttgcgtatacttatattgttacaagataaactcaacaatttaattacatacatctttgcttatatttgcactattggtagcacattaagaagtatttgttggaaatttggtcataattcagcatattttaatccaaaatattaagacaataaatatgacatttgcaatatgagtagatctagtaacagtgctagatgtatacaacttgagtatgcttaatatgaaataagcatcaacatttacatagtaacgcaatgctgccattgcgaagagtattaaaaaagaaacatctaatagaatcgagagaatgaaagtataccccgaaaacgtcccaccgctggatatttgaggcagtattgcatctgttgatgtcgttcatcttcttgtctccaatctccattgacatcttggtgaaggcgccgatgcagcagcagtagccgcgaagaataagagcagtcgcgcttgaagcactacccaaaaatttgatcgcccgcctacccatgtaagttctcaagcggacggagttccggaggcacctgctcgtcccgtacacctgtgcgtgcaggtgaacagaaccggggaaggattctgcagctcaggaacagaggaggaggaactcgaagtgcaagagtcgtgaagaacttcgtccgtccttctgctcgctgtggagtatatatatgcgagcgcaagagtaacgttcggagtcatcaaccgcggtgtttaatttcgtaaccgacacgctcgttaatatggaatcaattcacggcgtttaattccgtaaccgacggaatcaattcacgacgtttaattccgtaaccgacattgatacaaaatcaattctccgtgtttattaccgtccgttacaaaacgagagagcgcagcagcagcagctgtctgcctcacctcgcctcgccccgcctggttatccgcgcaccatctcaaccggtcaacagagactctctactagctccgtatttaagttgagacctcttcacttagatttccaaggtggtattattacctatagcacttaatgtgggccaatggaatttattaggatttaattgggcctagcccattaatctaacagcattatgatattcccgcagcaacacgcgagatatcaactagttaaacttaatgaagtgcaccggtcataccatcgtatcgccgttggtcatatcactctttcactattggtcaaaccctcatgttgtctccgatcaaacggccgccttgccatcggttagactgtagccttcctgattgtgccacctaatgctcgccgttgtcgatcaataaaagtagatcaactttattgaatcaagttatgtttataaagtgtgtccaaagacttctctcttaactcataaactagaattgaagtctcaaagcaaatcctaactttggatgcacttagctgttaattctattagaacagaaattctaatcacataggaaaccccttgaaccaaggaaatagcatccctttacaactccaaactccaaacttggatttcaatccaaatttgactccggtttttaaatgcgcacaacacaccatatatgccatatggaaacattcaactgcacgtgcattgctctctaacttgagcatctcacgtgattttcttgactgtctggacctcagcttttcccaagcctaatcccgatccatcacctgctatactctcatgacctcaagcaacatctacacatgaacaacaaaaaactctatattcaaatagaagttcacactaacttgactcacattagcacacaacagtattacatacgtatagaaatcatctagaagtcataaatatgaagcaatctagaaaatccatgcagacaaccctaaaccgattctctccaggaatttaccggtctgaccgttaggctgcccagtcaaacatcaccaacacctacagtctgaccgacacccactgagcacactgtacatcatcagaaaatactattcactagtttttttttccaaaccacttacctctgacaattgttcactacatagattaaatcaataccttgatttaacatgcaccactaccatccatgaccatgagaaaaaaatataggattttaacaagaatgtaagtgtaaaatagaggagcgcgaaacatacggaatgaccgtttgattgaatcccagaaaaaacacatgactttgaagagacataaagacataaaagaaagtttccatgttgttggacctcatgttaaatttccttcaaaagacataagaggattttcttaggatttatttgtattcaatcctttgaacaaagggatatttgtattcaaaacttgcataaaattttctatgttttttgtgtttatacattttttataaaactaacactttgtaatttaaatggtatacatcacttcttttgaggtatagcatgaaatgttttggcaggtttcagttttattacatggaataccccaacgactacataactattagtataattatttttttaaacatcacacaagataatacgacaatctgtagtgatagagccgactatagtcctgaatggctatagccaggataaataaaaagagataacagcatcacgcgtctgcaaccagaacctggtactaatgagacaagaacatgacatcccaaagaaaaaggatattctaaatgatgccttctagaaggatatgacaccgagagtgtcactatggcccgtcttgtggttcaggacgtggttttcacctagaggaatccatcaggagcatgagagatcactcaacaaagtcctaaggaaaaaaaatagagccagcaagcatcgcgatgctggcctagagaggctagcttttgcccataatcttcctgctcccccgtgtcgaagtctcatatgttgtacatagaacccatcaccaactgcactccttcgacgcgcaaccaccacgccaatgccttgtcttcggctggccatcaagtaggtgttggtatttgctacacacacagataaattcgcaagtgcacggataccactgtagcacatccccttagagtattccaagggtatagaacacaatgaacgtgtgtgcatatctatgaacaagattcaaccaaggacaacaactaaatggtagatttaggataaagaggattcctacggaatgcttcggttaccggcccacccttggtttgctaagctgagtccggtcttgagctctgtgatgtacccaaacgtggagggatgcaaaggacgaacatggatgtcaccacctgctgcctacctcactttccgtggagcacataacaaacgaaagtaacgtctaacctagacaccacgtctaccttatctattactactctagcctcggccaagaatttccttctttatccagagtcttatactagagcactcaatataaacactaagcgatgaatctgcacggattagaatatatctcacttagataaactaactaaataacataaagaaatctcaaatacttactttataaaagaagcatctgctaaggaacaagatggagaaagtgctgacactccggcactcctccgagactccaatggagagagtgccgataactccggcagtccttcataactcccctggagagaactctgaactttaaggtactcgtttcgaagctttccctcaatatcttcccatattctaactctactagagagtagtccaaatatcaaagtgagttgtactgcacttgagttgtgtgctttgagagtgaagtgaactccttttatagccatcctatggtggttgtgatagttatccaggccgggaacccgagttgtgtgctttgagagtgaagtgaactccttttatagccatcctatggtggttgtgatagttatctaggccgggaaccccgcataaccgccattgggcaatcatcaggagtgtacacgtggaagtagatagtaagaggagccaatgtctgttcggtcgacgttgtggttcggctgacccctttggagttctttggacattggcttctagaaaagaagttgcaacttgttaatacaagtattctattaatcctattaagccctgggctaggatgtcacatcctcacccgcttaagagagatcgacgcccccgtcgatcaacccaaggccaggaacatcccctcttggcctgtgtccagtgccagcgcatgtgccatgttgtgtgaccactctgcctgcgcaactgcgacacacgcgcccatgaaaccgcgagagtcggctctgataccactttgtaacgtcccgccttcccccaggccaggcccgcttacatctaatagctttcataggtcatagactgccctcacagaccaacacaggtcttttttgcacactttgtcctcactcgtgcgcacctgggaagaatttcccggtcggttacccatctcaaattactccgggccaagcacgcttaaccttggagttctttggacattggcttccggaaaagaagttgtaacttgttaatatgagtattctattaatcttattaacccctgggctgggatgtcacaggtcacctcccggcctctccttcggctagggggatgcctgaaaggccactaacatgttgtaccttggttggggcttaattataggtggttttgattgacatgtgtaccctccaatctatgtaatcgcgttctgagtgtccggaggtgtattttgtcgcatggcaggtggttttcgtccatagttcacatgcatacaaacattcaccaagacttatggaaatggttagtagtaaccactacctctaagtttggtattttattttatattctttcatttgattttatgcaggaattgacggtcgaatttggtacttaaggaccatcaacagtaggagctcaacatctagtgtgctccaaattcatccacgtaattggatccagtctccccacactagccaaccaatgtggccattttatagtggcaaggcgctgccacaagagaactagcgtcaggattaggacccgacgtagccctacaacgcccacctcacagcaccaccacaggccaccaatctgcatcgctgccacctcgtcctattgcctcctgccgccaccaaagctccggccagcatgccatgccgtggcatccacgctgtccctggcctcctaacggccaccgagtcggcctcccacagtcctaccgccgtcgggcacgcctgcttgcgccgcacctcctcgcgccgcacaagcctaccatcgctgtcagccacgcctctgcgctaaactagccctcagttgggagtagccaccctgtcaatgggaggatcaactgctcccaaccggcaccgctctgctcctagccggcgctatccgcttcctctcatcgctgtcacaacctccacctacctctcgtcgtcgacatcgcgcccttcctaccccgcccctccacctcatcaccgtttccagtttaggagccaacctcccgtgttggggaggccggatctggcaggggacgccagattcagcggtgtcacctcactgtcgtttccctggtcgactctgcctcatcgttgtcatcctgctcaacaccgctctcctcttcatcgctggcagccggcccctcaaggcgccgactctagcctagcaccgttacggacattgccgcattggatctagtttgggtcatgggctccaaccctcgaccttggggagaaaaggaaggccctgccaccgccgccatcctgtggccagccggtttccggcggtccgctcgggcggtggcgaggcagaggagggaaggaggtgggcgtggtggtgcggcagcggacgtcaccgtctgtgtcacccctgccgtaggagcgacgtgggggcccctattgatagtctttccgtccaatgggacatatatgggatcaaagccaataaaatagtccattaggcatttctaaagttcagtttatgttatattttattggcgcacttctaatataagggctgcagcaaaatgaggcaaggtggtctaaaagtttagaaatttgtaatgggcaagacggtgtataaaaaagatacattcaactgtaaaaagtagagttgcagccatcacaaatcactgtggttatgtttttatctgataataatcgtaaataatacggttcaagtccaactgtatggtgatttatctggcgatggtattttggatttgctcgcctcgtctgaccgagagatggcaacggggaattcaccatcaggggtcacatttgcgtccccgttcccgtgatattaaaatttcaccgtccccgtccccaccaatcaccatggggcaacatttcacccacccctgtcaccacgcggtgaattaatccccgtggttacccccgtagggagaatcagagaagggatagcggacggcgtgcgcgccgcgaggacagcgggaggcggcacacgctgtgagaggcggcttaggccatgttcccattgatcgatcgatctcgtggcaaggccgaagccatggttggcagatggctggaggcggccggcggtgtgacgacgactggaggcctggggcagttcattcagtgacaccaaatagaagtacaagtaaagtgccaaaagccgtcacccgggctgccctatgtaacccatcctggacagtgcccactgaatttttggagcgttatgtcccttgagcatgcattagggccttcataatgcaacgatgtggcgttcaaccccacgccctcaaaccgaatattcgacgaaacgtgggtaatacgcgtcgccaactaaagttcacagagctaaacgcagccacttggtctttgcttcgctcgagggggctcgcaccagggagaacggctgggtggcaagcgccgtgggctgggtgatttcctctgttcctcaaaaatatttagaccggcccaaggccacatgcattgtggacatggtatccaatagagtacctgggcatacatggcactccaggcccggctagcccgtggcttgccctgctatctcccttagtgatatggtggttctgaggtatgcaagcattcatgacaactgtggttgcagtttctttgaagtaaatatcgggggatcattccattaattatcttaaaaagaagtattcatgacaactatcaacctcttggaatacggtttgcttgcctctgtgaggtgattacagtcttttggaatgaacttgtttgtatgaattgtgacagatctgttgctcttttgagtttcatcgttttatccacaaagagaccattttgcgcaatccgtacgtgatctagtactcaaattaacaactagtagtgcttcgtttgctaaaatgactctagaacatacaccattatatatcaccaaggtagaccagaaaacaaatgcaaaaaaataagagagaaaaaaaagtgactaaagggatatttggtacaactcctactccaagaatggagcagaactgactactgagtagaagtagaattgatgctacatcctttatagtgtaatttttagtatatagcggaccgacagctctactctatgtattatccaggatattacgagtgttcggtacatgtctagctctatgtgataagaatctcggagtaagagctataccaaacaggccctaaatctcataagtgatcccaaccttgagcagctggtccttaggaatggacagcgccttgtgttcctccctaaggtttttcctcaagcgagtgtagacgtagttgacgacgatctgcttcatcaacgacgaccccggcgccgcctccacgttcgcctcccccatcaggtacaccaaccctcgctccgcctccgcgtcgatcaaccgcttctcctccgccgccatctcctccgccctcctcagcacgccgtcgtcatcgccaccgccgccgccgccgccgtcctccgcgcattggcaggcgaagacggcctcctcgtagacgaacaccttgaggcggtcgaggaggaaggcggcgaactccttggcgccctcgagcgggtcggtgtagccgtagcgcgccacgcagcggaagatgcggtggccggcgtcggggccgacccgctggaagatgaagcgctccgcgggagccacccgcgggatggggaggtgcttgatggacatgaacacgaagacggcgtgcacggaggggatcttgtccacgagccgcgggaacaccggcgggatcccctggacgagctccgtgtagagcaggccgacgccggggacgcgccgcacgtcgcgccgcgccagcagcgccgccatctcgtcgggcggcacgatgtggtccagctcgtaccagtaccgcttcacgtggacgtagtgccacgtcgccatgagcgccatgagcaccagcgagaagcagaaggggaggtacccgccctcggcaaacttggagaggatcgacgagaggtagaggaactcagtgaaggtgaacacgacgtagaacgcggcgatgaacggcagccgcaccttccagatgagcagcatcaccaccgtcatgaggtgggtggtgatggagaacaccatgacgacgcagatgccgtaggcgttgccgatgttcgccgtggtctggaacgccaccgtgatggcgacgctggcgacgccgatgaggaagttcacctccgggatgtacacctgcccctcgtacttgttcgacgtgtgcaccacctcaacccgcgggaagcaacccagcggcagcgccttggacaggatggcgaacgcccccgacagcatcgcctggctcgcgatgatcgccgccatgatcgccaccacgaacaccggccagaacagcggcgctgcacataacatttcagatcagaccacccacccaccaattcacacgcatttccaagtgaaatgtaacaaaagaaaaagaagttcaattccaagggaccaaaggatacctactgtacctgggagggatttgtagaaggtgtcgccaacatcttccggaaatttgcgcaggtaggcagcttgacccatgtagcatagcgcgaccgaggggaagaggacgcaggtgaagctcagctgcaattcagaaggaactaacgcaatgaacaatgcaagaatttcagtcgtgatgactgaccaaatgaagagattgggatctcattaagctggcatactacctggattgccctgatgttgaaatggccaaggtcagcaaacatggcctccgtgcctgccacattgcacaaacatggccttagcttggtttagtaacaagaggtgtctagctatgtcaaagtgaggtcacctgtgatgcagaggacagcgcccccaagggagacccaggcctccttgccgttcctcctgaagtaatcgatgatgtacatggggttgaaggcccggaggatggtgatctcgtgcaccgcgaggttgtacgccccgatgccggcgatgaggacgaaccacaccgagatgaccggcgcgaaggagtagcccaccttgtcggtcccgaaccgctgcaccgagaacagcacgatcaggatgggtaccgagatccacaccacttgcactgtagcaaaaacgacaatgcaaaaataattcagacgctattgagaacaagcttgacatgcagtgacgacttctctggtggccagtagtttgtgcgactagcatattttattgtaaaaaatattgatatgtcatttaggccccgtttgacgcagatctagctcccagctccaacttacttggagctagagctatgccaaactgtccaaatcctctattttagggagtggagttagcagagctaccctaaaaaatgaactacggcgttggagctggatttttgctgctccactgctccacttcaactcaaaagacccactaccctttaatttttttaatatatttacaaaaaaataccacttaactacccaaactcacctcatcaccccctctctctctctctcttctctctctctctctctctctctcaacctttacctctcccatgggcaggcgcggttggcggcggggtcaatggcggcactccgacgggatggcgcgtggccggtgcgcggcgggcggtggcttggaggcgcgtgggtgacgcatagccagcggcgggcagcacgcggccggccacaggcggcgcgtgcggggatggcgtgagggtagcgggtggtgggcggcgcgcggatggcgcacgcaaggactacacgcgaccggcgatgggtggcgtatgtcgagacgtcgacctagggcttcatgagttggggattgcatttttttccattttgttcaattttagatctggagctgaaagctagccaaacacttctcagctggtctccaactcccacgggagccagctcccactggagtgggaatttggagccaaaacaaacgaggccttaaactatggctgaactaactaaccaatatcttatattatgattaatagtaattcatatactcataaagcaaatatgatggattctttagcattctgttaataatgtaacaaatcaaaagtatataaactttatggtatactccctccgtcccaaaaaaagacaaaccctggtttccgtgtccaatgtttgaccgtccgtcttatttgaaaaaattatgaaaaaaaattaaaaagacaagtcaggcataaaatattaatcatgttttatcatctaacaacaatgaaaatacaaattataaaaaaaattcatataagacggacagtcaaagttggacacggaaacccagagtttgcctttttttttgggacggagggagtattagtttatcttccctctatctatatctttagacttttagtggcatcttcttattatctctattatcttcttccctacatttattcacctctagattattagtggcatcttcttagtatctctaataatcttcttccaccttataaagatagcaatattatatcgtatatttatgactgtttataacatgttttaaataatatatttctaactatgttcacctcataggaccctagaaaagcctcaaatcaagataagcaaaggcatgcacttttctctcaatatatttatttttcatctataaattgattatttctaaattttactcatacatgaaatactctcacagtaatttttattttaaccaaatatttcaaatttctacatgaaccctctctcttaaaattatttattttaatctaaattgaaaatattaataaattgaattcctgcaagaactcttttgtccataatatttatgtttttaatctaaatttaggtatttctaaattttacttatgagtggactatcttaatattatttatttataatcttaattttagatgtttctaaattgcatttctacatggactcttctctcactctcagtactaattatattttaatttttaatctgaattttgtaatctccctaaattgtatttcttcatggactcttatcttaatattaattatttttcaattttattccaaattttggatttccctcaattgtatttgtacatggattctttttttcatatttttattctttattccaaattttttatatttaaaattgtatacctacttggattttttattaactagaaaaaaggcccatgcgctgcaacgagtgaaggctattttaatcttattattatatggttagttaaggtgaacatcattggaattcgtttggagatatatatatatgtatatatatatatatatatatatatatatatatatatgtatatatgtatatatatatatatatgtatatatatatatatatatatatatatatatatatatatatatatatagaaaatcatgagctgcagttaggagtccgatcgtctcaagttagcatgcgagttttttttaaagagatttcttatatgactcattttgtatttcccaaagtgaacaaatttaagaaccgactcaaaatacaaatatatattttcaaaagcgaacgaacttaaaaaccgattcatacatagataatgtatcaaagcaccagcaaaaacatctttaatttttataatagtagagatataggaatttgtagaccatgagaacaaacctggtgtttttttccctactattaatacctttattaagttgatacatgtggcatgttaaaactgaaactaattaagaagtgctttggtgtgctcacattgtgtcaggcttggggctttctccctgatcccactcactgcagacagcactgcaaagagaacatccattcacaacagatcagtactctactgttctccaaatctatatacacatattgacagtttgacacatattatccatgtgcaggaaacaaaaactgatcgatcgatcgttaccagaaatcgctggcgtcagtgtcccatcacccatgaccatggaggtgccaaggatcgtgattgtgaacagtgcgatcttggctgcgttgctggactccagcttctgcttcacccactctgccctcctcagctgcgagctcggcgcctcgatgctgtaattcgacacgttggcgtcctccgtctgatcgttcgggatcatcctgatcttcgcgtgccgcgatatcagcgagtagagcgcaaatgttccacctgcagcagtacgcaagttcatgtaatgcaccaagaacatgtacaagagagattattgagaacaatggtgatgcatggttgctgcatcgatcgagatcattgaatttgaacaggttggattggacggatggacggacgtgtggatgatcggagctgatccgagctcaccgtcgccgttgtcgttggcgtagaggacgatgaagacgtacttgaccatggggatgaggatgagggtgtagagcatgagggagaggacgccgacgaggtcgtccgggtgcttgacgccgtccgggaacgtgctggagtagacgtacagcggcgacgtcccgacgtcaccgtacaccacgccgatgctctggaacgccagctgcagcgtccgcgcccagttctcctgcatgcgcgcgccacaccaacacacacaggcatcagtgtcgctgtgccttgcaggctacgagacgagagagacggcgatggcgagagctgagaggctgaccccggtgccatggctcttgtcgttggagaccttctctgcgtcgccgtagaacgagtcgtggcgccggagcctgtccacctccggcccggccgcgtcatcgtcctcctggacagacatcgtccccgtgtcgtcggctgatcgattcacgtcaccgccggtccgtcacgaccgacgagcttcgatcttccgccgtcggctcgactcgtgccactgccgccggtcaccgggatcgtgccgcaccctcgtccagccaccttgccgccatccaccgcgccggcgccaaagccgtctcgttgcgtcctgacgaggtgctcgaccgtcaagaggtggtatagaggaagaagaaaagaggagccggaaggtgggccccacctgtcatataggggagagagagagagaggagaaaagtttggtaattttccacgtggtgccactaattttattagagggagtactgtcttacctaaccagctaacctattggagaacaggatatcttaggacatcaaatcctatgtagaaatccctaaagaaagtcatttaaggagtggatttattgggtactgggtcttgaaggagcggctgtaaacgcaaagacaaattctcctaccagcttccggaatagtaaaatctcttctcctgcatctttctcacattgtaaacacgcagaaaccaaacttcttaattctctctttctcacattgtaccctagggctaattctggaggagacgcatgcacttcagctgatcattctgtctctgcctccgctctaaaagagacacacgggaaactgcaaatgccctgtctgcagcttcagatttgttgtggttcctgtgatctcgcggctcgtcgtcaggaaaacattcttcctgcatcaggccatttttagctcgtgtgccatgttgtaccttcacattgtttctgttttcactttttcttttgtttcggattgagggtccggaaacggatcggaatgacgtgtcttgagccaccagggaagccgtattggctgacaatttgttaggctgggctattgtaaatcttcagttcctttcgggctggaaattactgccagctcgggctgccatgaaatttgcactaaggccctgtttagttggtgaaatgaaatttttttggtgtcacatcggatgtttgaccggatgtcggaaggggttttcggacacgaatgaaaaaactaattttataactcgtctggaaaccgcaaaacgaatcttttgagcctaattaatccatcattagcacatgtgagttactgtagcacttatggctaatcatggactaattaggctcaaaagattcgtctcgcgatttcctccctaactgtgtaattaatttttcattttatctatatttaatgctttatgcatgtgtccaaagtttcgatgtgatgtttttgggaaaaaaaatttgagaactaaatagggcctaaaataaattataagacggttgttacgctaaaaagtttacaccctaatttacatcgtccatctgtttcacatatatcaccaatgcatgtgtcatgggatccatcatcgggtatattttgctatctcttatggtcttattttaatccttaattaaatatcatataggtctagttatgcatatatttttttcatttcagttatacactattttgtgaaagtgagcaagctattgatgttgttttagttttatcgataaaattgcttataagacattggtctatttagaatatccttgtactaataattagacaaagtatggttttattattcgttttggaggatttggtcaatatggttgtgagagatgtaggtgctttagagagttccaatattccgatggactgctaaatagttatttatacctatgtttatatttaattaaattgctatgtatttttattgttcgtcatatatctagggagaaaaataataaggcaaaattatttggtgcatcacacctaatggttatcaggttaatagagacaagtttttggtaatactagaaaaaccggccgctacttattgctgttgggagaaaccttagtatataaaattaattcggtgtcacatgtaattagtattgtactgaactgactactattcttttcatctaaaaatatcaaaacgtaatactaaagctctatccagatttatattgtaatcaaagttatatttgatttaatactatatttttatattttagagcggataaagtggtagtactgcacagcatgttagacatggccgtgtatgatgcatgggtgtgtccatcatgcctgtgtacacgtgtacgtgcatgcgcctttggttggtacaccagtacacaacacataagctgtgtgcactttatttttcgagtctatgctcatttgtttcacgctttccgaattactgaacggtatattaactttataaaaatctctaaaaaatgtttaaaaaatcatattaacctgtttttcgagtttgttcagctagtattaaattaatcaaggactaatgagctaactctttttcacgtggagggaatgggttacgaaccctaggtttgaactcaccaatagtatggatgttttaatacatggatgaatgtaggggtggtaattggtctaggctatggatagtttcacaaccctagctagtcctcgtatatttttagttcaaaatatattaattcagtccatcctatttcagacctgccctcaaattttataggttcaaggcttagctacattaccactcgtatgcatgtgtatctgatagtaagagggtggatccacatgttgtttaatggataaagcgacacgccagtttgagcaacgtgatggttcggccgtggtaggtacgagagtgacagaggcttactttgggctcttttgctaatggtgctgaaccagcgtatatacggcggatccaaagataaaattagtggggtcttcgtggggactcgagacccgccgcccccattgttgatccacccctgagcatatcgcaatggcaccacacagtactgtaacgatcctggagctgttcataggcagagtattctgtatggggtcataagggtagtagtagggcgtcacagtattttatcggacctcacatgtcacatatactaagaacaatgttagctacatgtttcacggtgcaggtcacttatagtgggtcccactaataccgcttttttacttttcatctcctcttcttttccttttcccaccagccaagaaagcctggcattaggcggtgacggcaccgctactcgtcagcgtcgagcagagcggcccacgtgcaacggcgccgttgactttagcggttcgaggtactacctccatatttatgtattacgccgttgactttttatccaacgtttgatcattcgtcttattcaaaaaaatttatgcaattatcatttattttattgtgactagattcatcatcaaatattatttaaccatgatataaatattttcatatttgcacgaaaattttgaataaaactaatggtcaaacgttagtcgaaaagtcaacgacgtcatatattaaaatacggagggagtatatgctaatggagaactaggaagttgatgttccctgctgctatatatgccgaactcagctgatactattagcgtgataagtgcatgtaccgcacttgctgggcctcgattaccagctatgatcaagtagggaagaaaacagtttggaaacggacggaaattatttttatcgttttcgtttctatatttttttttcaaaatcggaaaccccatatacgaaaacggagcgaatacagtaacaaatatttatcggaatataaaaagcccttaaactaaacttctcaaatcaaggaacagatgtagctcaatattttttttctaaaacaataaattgatgtttctattttttttatcaataataataataatacaactagttgtacactttattttcttggggaaaaagaactatatttatctataactataactataagtagtatgacatggactaataaaaatttaaaaaatttattaggcaaaagaaaaatctaaagtactggactaaaaaaattatttaattaatcacctcaatacatagtataagtccaaacatttagagtagataaagctgaagctaatcaattgtatatgagaaatactctgtctctgattccgagaaaaaaaaatttgaattcatttctggaaagtttccgacgaatagtagccttataatattcgtttccgtttccgagaaaaatatttaaattcttttccacttccgaaaaaattccgaccaacacttttcgtttccgaaaacacatctagaatctgaaaactttcttaaccgttttcatccctaactgaagccccagtaaagatacatgctataaagatacatgctacatagtcgactatttttagtgggtcccaacaatatcttccttctctctcctctcttcctttccccaatggtggaggaagctgcgtcgccgagcaaagcggcggtgggggcgacccaagtggtgatagcgtccttgaaaagtgtcgggggcggagtgccacctctcctcattggcccagaaaccacaagagaagatgcaaatgatggcaccgtcaagctcggcagatccggcctagggctcatcaaatttggcctcgagcggtggcgaatgatcatcagggcgctgcacgaggacggcagcagctcaacgccagcgccactttacccttctcttaggcgatgacgacgacaagaacggaggcggatcgaggcaggtggcggcacctctccctcatctccttcttcacctctagacggtaacaatgagatccacaagttatggatggacggagggctcaaggcggttgccgtcgggctgctgctgctgtggatgggtcgaggccgtcgccaccctgttgagcttgtacctctcctcatagtccacggccggcgcaacatcgatgttgccggcgcggcccaagtgctccacgaggatggcacctcatcgccctcctctcctagccgatgagctccactagtagagaaaccatctttgcccggtcaaccaaaaaccacaatagtctcggttgtagtaaaaaccgggactaaagatggtttttaatcccggtttataagtagaacaggactacgtgatctttagtcccggttggtgttaccaaccgcatgctgtcaggtgttgtcaggcccctccaggatctttagtcccggttggtgttacgaaccgggattaaagatcctttaatcccggttcgtaacaccaaccgggactaaagatcacgtgatctttagtcccggttgatgtaacgaaccggaattaaagatcaaaacgcactatataatccctattatttatcctcttttctcatccacacaaactcctctctccctccatctctaatccttatctcatcccttctccccttcctccttatctcttttccttcttatcccttcccaactccccttcccaactcgatcctgtgtgtgcagcaggagggggtgggcagcccggccggcggagggcaacgcggcggcgcggcggcggccggcgcagcgaagcggcggcgcggagggccgagcggcggcggccggggaggaggggaggcggcagctggctcagccggccggtggctttgcttctttttttttcttttttttcaaagaatttgtgatccatgtatagattgagatgaagaatctgtgattcattgtatggattgagatgtataatttcttttttggaatctcattgtatggatctgagatgtacatgatttgtgtatttgggatgtttctttgatttggggtttgatttgggatgtataatctgtaatgtatatgattgattgatttgtgtatttgggatggtactttgattttagggtttaatttaggaatatgcatcccacctaatttgggagaaaataaattagagattaaatagtaagtaaatgaaaaaaaaactattgcccgctcccatatttgactaaagattgatctttagtcctgggtatttgaaccaggactaaagatagggatctttagtcccggattcgtagtcccggtttgaaaattgggactataggggggttacgaaccgggactaaaaacgatttctccaccggtgctcggtggtgtggagcacgggtatgagacgtatgacgacgagatccctctcctccggttctcccctctccctccactagctggcatcactgagcacgggactatgcgtcaccaaccctgcaaattctgacgagaaatctgttactctaacttgacttcacgttcttcacagggcaacgagagaggctaacgtggagtcaaatctctcacctggctcgctcgggaagaaagaatgacatctaagcaaagcacaccgtgaaagcctggacattgcatagatttgttaggtgtttgcatgccagtagtgtgtttgttccatggcatagacctgcagctcgtgtaggatgagcagtagtagtactgcaggagtagtagtatgtcacggcggcgacttcaccagctggacgtaacgatcagcacgacatgggccaaccagagaagcggcccattcgcaatcggcagcccaacaagcggtttccggagagtacatggacccagtagcaattggctgggccattgagagggagagaggcttgatggcgcattgctatataagccggcagcgatagagagaaagcgtacttttgtaatcaacaattaacattcaaatcgaatctctcttcctgctttcatctccccctctgttcttcctcgttctctctctctttctcccaaattcctctccgaatctctcctctaatcctcctcagccacgagtttgttgcgaagcaaagtcaggatcgtaacatagtactccctccatcctaaaacataagtatttttggacctgacacatgcatacgaggttgaaggagtagtagttacaatggaaacatgcatataagagtcttgcagcaggcgaggagatttcaggtttctgtgttgatgctggtcgcatgcaggagccgcgcgcagctactgatgaaccctaagttcctctcgatacttaaggctgttgttggcccgatctttcggtgagttgtgataactacgatttgggagaaacgttgacgatccgactacaaccgtacgagacgttgtgttacgccttagcgatcgatacacctctccgtgggttgttgatcttgccggtgcaaatcaaccttattcctgcaagaaaatcaaagaaacaagcaagaacaagataaaagcaatctgaattgcaaataggagttaaatacgaatgataagttggggttccaaagaacaagcagacggacggtctagccgacacgcgcgctgcaagcaagtagcaatggctaaactttaatctatcaaaacccgagaaaccctgaaggggtaactagctatatataggggtgggaggacgacctaggggtgcctagggtcgtgctccaccagcttggggcgcaccccacatgggccccacctgggccggggtcccaaatgaagttacaagcccacaggcccattacagacaatgcagcccattgtttcttcaattgcggctcactgagatggaatatcacaatgaggctagatccattggaaagaggacttcgggagcttttcatcaagtactcacgggccgaaaacggagctcgaatggagaattgacagccgtttgaagtcagcagtatagcaggtggccgaatcggattccagcacttggaggacttgatcttgatattttcttgttcatccatgatgtgagcaatggttgcatccgtggtagccatggtcacatcatcctccccttcttcacggaaaaccgtcctcggtttttccatatggtgctctttgcgtagtccatttacaacaacctgtttcttccaatcaaaacaaggcaaactcgagacattttggttagcaataacatttttctctagcttgcatgttttatccacatgtacaggaagttctaaatctgagcagatgtaaactctatgcacaaaatatattctaagatcattatatttgccaaggatgtgaaatataacattacgaggacatggcaaatcagaatgagcaaatattttgtccttcaaacaattgagctcacaagaatcatcaaacataatatagcccaatgtatttaaagaagattgcaattgaagttcatcattctcgctggacgtgtgaataacatacttaaattcagtacatggagaatcaagattaaaagtagcatgttcattcactagttgtggaatggatataagtgaagtactatcgcacaactcttctttattacaaggaacagaatgcaaatcaacttgtgacaaaggcaattcagaagtaggttccactaaagtttgctctaggtcagcatggaaagtggaaaaatataattcatcagaagcatactcaccttgagtaatttctgcaacatttaatttaccttttatgccctcttcagataaggtaggtgcatcagccttctcctcattcgtaagtgatggaagtgacatctcaaacatatcgttcttctcattttagggactgttctaaacttcctgcaaaacatcagtgataggaggcacaagcatagcttgttgctccgttgggttctccaaaattttgcgctcaacattgcaagcaagcatgaacaattggcctatatgattatatgtcacattaacaagcccaacttgaatattggaattaagccctctgaaaaatctagttattgtgttctcattagattcttgtaaatcactataagtgatacaaattttaaaatcatgaaagtactccctaacagttttgtcaccttgttttagatgttcaaatttctcaaggagagcatgtctatagtatgaaaacacaaatctttttctcatcagtattttgcattcatcccaagtttcaagcttatttcccacagtatgccaccaaaaagatgcagaaccggtacacttattactagcagccttaatcatttgagcattacaaaaatcatactcatcaaattgtttttctactggtagcttccaattaacataagcggcggaatcatacttaccatcaaaaccaggcaatttagattttacccttgcaagatcattatcatgtacctcatatgtgatgcgtgaagaagtcgctatatctcgttgatggtgaagatgttgacgttgagcatgaccatctcgtttccccgtgcgcaatcctaccatggttagtagcaaacaagaaacatacacaaaaatatgcgcgttcctattaactactaggtagtggcagcttaaaaatcacacacactcaagcttttaaccaagctcttacaagatcttaccaatgcaagcggaatggtgatgtacaccgacttaaccaagcacccaaatggaggttggatgtatcgatgccttggcaaacacttgctgtatggctgcaatcagatctgtggagctctgggtagacttaaatatgtagcaaagggatagcaaatgctcaaatcagataatgcaaagttgaataatggtttaaagtcaagtaccgtgctggtcctaggctagaacgtgctagagacgcgagcctagacacaaacgataccacaagatagcactaggaacaactcatgcacaactctgatatatgaagttcaactcaaacataacagtattttctcttttctttctttcttctttctttcttttttcctttccttttcttttcttttttttttggtgcggcttttcttttctctttttttttcacctttctgccttttttttctttctttatttttgattttattttacaaaaacagattcaaggaccttaatgtaagattacagggactcaaacgtaaatacaaaaattacagggactcaaatgtaaaagttcaaacccaaaattagaactgtacaaaaatggaatcctctcgtcctgtaggttccgtttttggaaatggattttcaatccgatactcgaaaaattttcaccaagcagtatgcaagatcacggtatagattgaaaccgtgaccgagaggagacactcggactcggcctggtcgcggacccggggtggtggtgggtgaggaaaggaaggatgcggcactacctaggagtccggatatggtgagagaaaaaaggaaactgatttcaatcaatctgatctactatttctttccagattaaactctcatacttccaaaaacagatttggaaattcttcttcctcctctctacaccggcaacaagcacaggccgatctattcacgggcaaaccagaaactaaagcaaatcctaaatgcaactccaaaactgaccgataaaaaattttgaaaactacaaaaatagaaccgtggcagcaagtcgattccgtttttgtaggtcccgacgacaacagagacacggaggcgacgacgactgtggtacaaaacgtgaccagaactcgaaactctaaacgaactaaacgctaacaccagcaactcgactcgacgatgtaacacaaaacttaacaaagcaaaaactgataaaaacaatgcaatggcacaatatggctaggtacaggacaattttttttatggcaattttctggttatgggtagataaaactcaccgagcaacgaaagctctgataccacctgatggaccctgagttcctctcgacactcaaggctgttgttggcccgatctttcggtgagttgtgataactacgatttgggagaaacgttgacgatccgactacaaccgtacgagacgttgtgttccgccttagcgatcgatacacctctccgtgggttgttgatcttgccggtgcaaatcaaccttcctgcaagcaaatcgaagaaacaagcaagaacaagataaaagcaatctgaattgcaaataggagttaaatacgaatgataagttggggttccaaagaacaagcagacggacagtctagccgacacgcgcgctgcaagcaagtagcaatggctaaactttaatctatcaaaacccgagaaaccctgaaggggtaactagctatatataggggtgggaggacgacctaggggtgcctagggtcgtgctccaccagcttggggcgcaccccacatgggccccacctgggccggggtcccaaatgaagttacaagcccacaggcccattacagacaatgcagcccattgtttcttcaatttgcggctcactgagatggaatatcacaatgaggctagatctgttggaaagatgactccgggagctttccatcaagtactcacgggccgaaaacggagctcaaatggagatttgacggccgtttgaagtcagcagtgtagcaggtggctgaatcggattccagcacttggaggacttgatcttgatattttcttgttcatctatgatgtgagcaatggttgcatccgtagtagccatggtcacatcagctacggacgatgcaattgatcatgtttggctactcacgttgctgcgcgggagcagtatcgcagagaaaaacaaaaaacggatttgctatggtcttgctcgagctcgaaggagggaggcaatcgaagcgtacgttgttggcctgcaatccggtaaatcggtaagctactcgattggtgttggccagactccagagaagttatacaagaacaccgacgaaaactggccgcagccaaggcttgcccgcgttcaaaacgaaatctcagttaggactcctgacaaatacggattaaaaagtagataaaatatttttttaaaaaaaacacacatttaaacaagaacgaaattgcaaaacaaaaaattacaaaacataagaaatgattgtttgagtaaaccacattaaaaacgcaagaatcgaataacagatagactacataagagctcatgctatttattttcccacaatccttataggattgttcatcccataaaaatgttatgaaggatttatagaattcaattttaatacttagtttcgaaggtttttataggattttttctatagaactgaaatcatcaaaatttactatgcttcttacaaatcaaagagaagcacaaattggtgacaggtgtaaactaatcttcagttgaccaattgatctgaactcttcaagcttcaggtagcctgcaagtttctccagctaaggttgcgccttcgtttggtgcgaaattaagatgccgtgtcacaacacgcacggcgcacggcgttgcaatcctgcatctctccttttcgaccgtggctgctcgtgaattcgcgacacgagatcccgcggactggacgagtaccatggatggcgctgcttcttttcactaaaccaacttgcctggcaaatatagcacgtagcagctgactagtggggccactaggctagccactatccatgctccatgacagtcagcatcagcaccatgaccactggcgacaaaatatgattttttattagcgccaccatcaccagatccaacaccgttgagcccgcacataaccccttgcaaaatcaaccacggcttccaaaatttcggtgccatgtttgacagctcagttctttggcaatgctcagtgaaaatgcacgattggatgcaattacatcagatggtgtgcattcctgtaatatctattgatgtaccttgcctgcgatacaataggtacagggttaaatccaagacaaaatatacctggtactatggtagtatgttccaagaagtatccgaggagcgatatcacatacctttacgttgcttacatcaggagtatctagagtttttacaggataaaatttgtaaaattggatattttcaaatgcctctttgatcttaggatccatatcatcaatagctttctttctagcttccttagcctgcaaaagatttgaaaacaatgagtgcacttgaatgcattaaaacatctggacatctggtaaaagtaattaacatttcagttgactgacctgtttcagctctctttttctctctctaaccttctcctttaggaattcctgccaaagaaatgtgccactagttaggaaggacaactcagtgagctgattatcatatcttaagccgactattcttctgacagcttaagcaatactaataataacaggcaccttcattttttctctctcatcctccggtagcccctcctctttaactttctcatcagcaaagtcctgcatttcaacagaatgactccagacacaggttacttccaaaggtagaaccagagcaaaactaccaaattagtacaaacctcataatcatccatctcccagttaaactcacaaaatatctgcaacaaacagtacaaagtaaatacaaaattattcgacaacatactgaaacgtggaagcaaatataaaaaagatcaaaaatagaggtatttaactaagtttttttttaataatttcagtgttgacattaactaagcatgggcagtggtatagtcattttaccttatcgtttcagagcaatcaaaaatttgcatcaatagcaggaaaaacatcacaattaaaatttccaccaatggatagaagtgaccagcctgataagcatgaaaacagaacctggacgcctaggcaattacacagacaactaaacaaccccattaagctaacaaacagcagcaattagattttgcgtgaaataaccagtatgcaacagcaattaagaggaaattaataagcatgcagcagaagttagaaaataatcagcccgcagtagcaattatggaagaaaataattgatgcagcagcaatgagaggaaaaggcaatccctcgctctccaggctgctgatggagcagctaaaaagaagtgatggtaagaaggtacgaaaaattcagtgatgacaattaggttggcagcagcagtttcaacagcaaactccaccccatttcgatctgcctcccatgccccccgtcccaccccacccccaaaccaatctctttaggcaaggcaatggcagtagcaacctctctagagtctagaccacctcgacaatttgagcaatgcattgataagtgataaccatgttgataagcctaaaaaagggcagagctgatgtgtttcaggctcaatacatggaccaatttaggagggcaatcagattaataggaataaaaatctctcctgatccaactgatcatgatgaaggtaactacattgtaggaatgctagtatgaggataacagcagtaaaagtcaaaagatagtgcttcgtcaaagttggcagggggcaccagcagcatgcggtttggttttgacctcaaaagctagtgcaaatgaagcatcaccaacataagcctagaggtgcgtagaaataagacagaaaaggtcaactcgagctgcatatacgataaaatttatcttctcacacaagctacagcttgagttgacattttctgtcttgtttcacggcagcttatatcaatgaaaatgaagagaagctacagctgcattttggtcagaggttccttaaatgttgtcttaatgaacaaacatcccaattataggctatagtaaaaaaatatattactttgcagattacacataatgtgatgattacagaaaatgtcattttgttacagtatgtgttgatcacaggactcaataacattaacaaacagctgtgttaaaagattgtttaggcaaaactggaaatgaaaaacatactaaaagaagcttaccggtggttcaaaaggatataggatattgataactgtatcatcttcattttcaggaggatttagtggcatataatctgcaatatcattgaacaaggttcattggcagatcacattacttacaagtctcaacaattttcttaaaacatttcacatcatatgtatgtaataatataaatcaaacgatgtaataaaacagttgatcatgaggaattatagacaacttaagacctcaggttgtgctacggaaggacttgagtaacctcttttgttgtttcgcatgattgttgaccttgccatgctccgacattttataacaagatttatgtggtatgtctatggttgcaccacagttactaatattaaaggcacaaacgccactggagatcagttcattacgcaatgtgttacataactgggaagaagtacctcggacactccgacccacagtcaacacaggatatgtaaatggtatcaaataggcagtggtccaagatgcagttttaaccaatagttattaaccatatatacatgccatttgtggttttgcaaataaatactagccatccaagtatccaacacatgaaaatcagccagctaaaagcccatcaaagtcaaaaggctactacactctggccgaatgtaaatttgtctgccaattcacccattgcaatgaaattaacattttttttgtttttgaactgaaacagcatgggaatgactagcgaaaagcttcttatcccatgactgacgcatttgcaacagtttaactgagacaccacagggttttgcaggatataatgaaaaaattcaaataggaaagactctacaagcattcaaagaatcctacgaaaacaggtattttttaatacacacaaaacacttaaataataatcccaagtcagcttacatggcatgcagtagtcaaacagcttgactcgttcggttttgagatgcctcagtgcagacctgcaacatgtacagacgaggatacactggaatgtcagaagaaaaatctagggaaatatgtgaacagtggatttatgttgcatgcttctggatgacaacatcctaacaaacaaaagaaggatagaaacagaaacatatgcccccgagcatgatttgctagtgagaacaaagaacagcatgagtaatactaacctccgctgagtgcagccaagagtaaatatttttgttttcaaactgtcaatcctactgagcctgtagaaccaaaaaacaataagcatgagcaaaatgcaaaactacaaatgatgattggtaaaagaaggttacccactaatgatgggaacaaggtaattatataggttcccaaaagaatgttaagaaatactatgagagtaccggtcctctagcggaaaataaggcacccaggccatcttcattgctttcattggcaatatctcttcattttccctttggacagaatttataccaattttatctgaaggaggaaaaggacagtcaacctgcaacacagaaaagagtaaaacaggtgctaaatgagattcaacatgcagcaagtaaatagttatatacttaagttagtgaggtttaaaaaagtcaactgccaatggcactgtaacctgtttaaggagcaaacaaaacaatattggagtaaaacaatacagtaaggacctggaagttggtcctctagggttttatgaaacaaagagatcccacaccaaataagtttttagcagtataccagaaaaaccaagaaaaagaaaagctttgggtactggcattattcaaaaataacaaatgtagggagtacaaacatagtcatcaagtatgttgcaaatggtatgagatgttgagatgccataagcatgagataaatgttcaatttaagtgtatatgtcaatgtggaccattttcttagatgtacttttccagtaatgtaggtcaagagaatggaagtgaacttacagcaactacaataggaataagtactatcttcgattcgccattcacacccaatagttgagctgcatgccaatggaaatgagccagtcagataaactgtcaataattatttaacaatccggtacatcccaagtataaattaaaaggatatagaaagacaagaaaacttttttttccacacacacatggtgaaacaaatgacctttggtactaatcaacttgaaaaaaggccgactcgcattggtatgtgtatcacgaattggagagttaatttttagaacaagtgcgagagtaagactacttacgttcagtgcttccaaacaagtaaactgttttctcataaagctctcccccttcttctagggctttctgatcaccaacattaaatcatatgtcatgctgaaagcaagtgtaatactaatatccaaaaaagagtagtattggaagactatctgcacatcatacctccaaattttcaaagttccagttgaactcctttatcttatcaatattttcccactgcagatgacaggccaagaaataaatagcagttagcagtaaggccaaatgcctataacatacagctttatgtatgctaaaatttgcatcattgacagactcaacagtaaattgaaaaaaaattgaaataggttgagcccatggaatgcacacaaacctcagtcccaacaggaaaggctgacaaccaaagatcttcctgaacaaggccatatatcattatgcataggcatcaaaataaatatagcagataaaaataatggatataaggacggtaatgaaaataaaaagtcatgatgtggcactaaaaatggtcatcacacgtagaacaactagaaatgaatgattgccatagagaatttcagatggttttattttgttgctgcaaattttctaacttgtgctcgctgaacaattgcgtgttctacttgtattttcttccccccccccccccccacacacgcacacacaaaaaaaaaatgtagcatccttgtttagtgtatgcatagaactatatgtaccctttttgcctgtttgcaaagacaaattcattgtccaacaagttccttttataacacatcacacacatttccaaataattgattactctaggattgcttccattaatggaaaaatttgttgcaggccatcctggttctatgggatttgttgtaggacaccacaaaaacgtgttttcaccacagatcatgccagtttgaagttaacttgccaaaacatactatggtcattattttaacacatctggctcaattggagagattaaattttataaatggcgcttttaccctcgtgccatccattgacaaacatctaaaaatgatcaagtagtcaaaacaagaggcattatgcggaaaaataaagtactagatcagatgaatttagtgtcagtataatcttttgtgatctgattgtgattgttaaacaggttgaacaagtgcacaaacatcctttctaaaaattctctctccagttgatccggatatgttagaataatgaccagagcgcgtctgggcaaacgaccacaaaaccaaagtatcgtatggctaagccacatttttatggtatcatacggtaaatgccacaaaactaggatgtcctgcaacaaattttgcaatttcattatttcaatgacatctcaaagttcactgtgacatattgttcagacaatcatcccatatagcaaagcacttgagaataaaaccattgctagcactgatctagaacaacaggaaatcccacacaaacgtggctagattttgtttctcatcaccaacaatgcagtaattctacggcacagcactaaacacgaaaatccttcctaatgaaatggggaaccagtatagtccagctaaatccagtcacatgttaaccatgaaatttcggtatttgagcggcacacgcagcgaaaggcaaaccaccaccatttggactaacccgaccacgccaaagcgaatccaggccaatcacagctccccccccccccacccccccaaacggcgatacggaaagcacgcatcggagcagggtaatcgggaagccttcctcaccagattccgcttatcggggaagtactccgcctccgtctccggcttgggcgacgccttgacacgcttccccctcccccgcgtggccgcatcctcctcctccgccgccgccgccgcacgcttcctgcctctgggacgcggcatcgctctcgattagggcttcgacccaggcggcgaggctgtgagtggagtgacgctgtgtgtcacaccggctggtgtgccatcggcggctgacaaggtggataccggagaagtgctgaagaagaagaagaagaaacagcaaaggcagattctcattagacgccttcgctgaggggatacgtatttatgtatatgtgaaacctgtgtctgacttgtggaccaggaaaggggtttaaattatgaaggggtcgaacaactatgtctgccgattgtcaaataagaaaaaaaaggagcaaccacccccaaatcctcacgcgttcacactgtgcccggcggctcgcagcggaatttctcgtcgtcggcaagcggggtataacatatggtatcagagcaaggcaatccgtgtgcgcgcttcctcacactttcttaatccgacggtaaaattcccatagctcagttggtgatacccgcaagggttcgtcgccgtaaatctgttcgagggttcgttggattcggaggaggaacaccacggcacccgctaagcaaggagtccaggtgaggtaggtagtggcggcgatgagtgagatggaagagagattgctagcagcggtggaaaaactggcagaaaaggtggagcgcatggggttgatctaggagaaactggaggcaatggataagaagctcgagaagcagggggagagactggatcaggtgcaaaccaaggtggatttgtccatggaatccttggggcaagtacatcaggagcaaattcaagtctcgcaggcggtgcggcggggagcaccgtctccgatcgcgaccccaacccggacgctggaagggacctcgtcggtgactcgagaacggcctcaggtaacaattccaaatccagttccgtcaccaccacccagggttgagactgaagaaataaatgcacgaaacattggggaagggaacaggggaggtaaccaggagcatcagtttaggagaaacatgcctaagatggactttccgaagttcgatggaactgacgctggggtatgggtagacaattgtgaaacatattttgctatgtatcagattccagctgggtttaaggtttcagccgcatcactgaatcttgtgggaaaggcagctcactggtataaagcttggaggcagagagtgggtttgcacggatgggagctctttagggatgctgtggtccgggagtttgattttggaactcatcacattaaagctaatgccatgttcgagttaaagcagacgggtacagtggatgagtacaaaagtcaatttgatgatctgttgtacaatgttaaactgtatgacaggactgagcttggggaggtttgggaggtaggacattttgttgctgggttgaaggatgttctaaagacccatgtgctatccatgttacctgagactgttagtcaggcctatcattaggccaaggcaaatgaaagtgtgatgggggaggttgcagaaggaaagaagaagtggggcttcaggactggtagaagtaagggaggtgagaaaccaaaattctctactggggagttgtggaaggctcagcaactgaaggagtaccgcaggattcatggactttgtttcaagtgtggagaaaagtacagccctaatcatcagtgtgcccaacttccagctgcccaggttaatgtggtggaaactattgatcataaggctcttttgtcagatgaaatgcttgaggctgtaatggatgtggaggatataggacaagatcctgatatgtttctgtctcttaatgccctagctggatggggtaatactggcacaattcacttaagagccttggttcaaaatcaagtgttgccgatcttagtagactcgggcagctcgcatagtttcctcaactcacacttggtggagaaattacaattactagttcataatgttcccacaatgacagttaaaattgctaatggtcagcaaatgtcttgtcaacaaatagttcacaactttgaatggtggattcaggggaaaacattttctcatgatatgagagtgttggatctggggggctatgatgcgattttgggcattgactggttggtgaaatttagtccgatgacctgtaattgggtggacaagtgggtctcctttgtatacaaaggtgatcaggtgcggttgcaaggagttaagcctacagttgctcaaccccttcctctgcaagcagtttcagcagagcaattgttgaaatggcatcaaggtaatgaaatctgggttgttgctatcgtgcaaccaggagacaaatagttgtgtcctcctatcctgctgaagttcaacatctcattgacaaatacagcatgatctttcaaactccctcagtcttacctcctcaacgaagttttgatcatgctgtcaccctacttccaaacacagctccagtcaatacaaggccttatagatactctccagctcaaaaagatgagattgaacaacaggtggctgacatgataaaatctgggttagtggtatctagtctgagtccctttgcatctcctgtgctcttagtcaagaagaaggataattcctggcgttattatgtgtcgattacagaaaattgaatgcagttactgtaaagaacaagtttccactccctattattgatgagttactcgatgaattggtcggtgctcaatttttctctaagctggacttgcgaagtggataccatcatcaggatgaaagaggaggatgagtttaaaacagcttttaaaacacatcatggccattttcagttcaaagttatgccgtttggcctcacaaatgcccttgcgacatttcaatgcttgatgaattcaatctttcagccttacatgagaaagttcgtcctagttttcatggatgacatattggtttacagtaattccttgactgatcacttgtctcatttggaaattgtgtttcaagtcctataggctcatcaattagttgctaagctcagtaaatgctcctttgcaatgcaagaactcgaatacttgggccacatgatttcaaaaaatggagtagcgactgaccctgctaaaacctgggtgatgcaacagtggccggttccctcatgtgtatctgagttgagaggatttttggggcttataggctattacaggaagtttgttaaacattatgggttgctcgcgaaacctctcactgaattgttgaagaacaatagagcctttgtatggacacctgctgcccaggaagctttgttgccatgaaacaagctatgtgttctaccccggttttagcactgcctgatttttctaaaacctttgtcattgagactgatgcttgtgataccgggattggggctgttttgtcacaagaagggcatcccttggcatattacagtaaagcattgggcactatgaatcagaaactatccatttatgaaaaggagtttatggccattatgatggcagtggatagatggagaccatatctgttgagaggtcctttcatcattaaaacagatcacaaatctctgtcatttggactctcaagtcttggattctgacatgcaaaagaagggactggacaacaagtcagctgatgcactttctagagtgggtcaatattttgcagtacaatcagtatcctctgtacaacctctttggatacaggaaattctcaattcttatgcagttgactttcaggctcaacaagttttgcaagaactggctatcacttctcctaatgagcatggctttgaattggtggggggtttgatcaaacataatggtagaatttggattggtgctaattcagccttgcaaacaaaaatcatatccacctttcattgtctgcaataggtggccattctggtgttcaggctacatttcaacgagtgcacaagttgtttacttggccacagttgcgcacttctgttcaggaatttgttcagcagtgtatggtttgtcaacagtccaaacatgagttatgcagaccacctggcctattgcaacctttacccattccccaaggagcttggcaagacatctctttggatttcattgatggcttaccactgtcagcaagtaagaatgtgattctggtggtggttgatcactttactaaatttgcccatttcattcctctgaaacatccttatacggctcagcaagtggctcttctttttctggaaaggattgtggctctttatggtcttcttaagactattgtttctgatcgggatgcggtgtttactagtcaattttggaagcagctgtttactaagatgaaagtgcccttgaacatgagtactgcatatcatccccaaactgacggccaaccagagcgtgtcaatcaatgtcttgagatgtatctacgttgtgctactgcagcttccccttctcagtggtgctcttggcttcctttagctcagtactggtataatactacttaccactcagccctgcattgtactccctataaagccctctttggtcaagacccacggtatgcttttctgccttaactttgttctgattctgacccacctgatgaagctggagtgcagacattgttgcaagacaggcagctcttttctgaaatgctacagtatcagttattgagagctcagaatcgcatgaagcagtatgctgatgagaaacgttccttccgggaatttgcgatgggtgataaagttttcttgaagcttcaaccttatgcctagaaatcggtggcttcgcgtccctaccctaagttggctttcaagtattttggaccattcgaagttttggttcgtgtgggttcagtcgcctatcgtttacagttaccacttgacagtctgatacatcatgttttccatgtgtcctagctcaagaactttgtgccttctcatgttcctgttttctctgaactaccgtccacggttcagttggatgttgcgtctctggaaccctctgaaattttggatcgtcgtttggtcaagaaaggtaatgctgctttgacacaagttctggtgcgttggggcactcttcctccggcttgtgcaacctgggaagactatactgtactgcaagcacgttttccttcggcaccagtttgggggcaacctggttctcaagggggcagcaatgtcacaccggctggtatgccatcggcggctgacaaggtggataccggagaaggtgctgaagaagaagaagaaacagcaaaggcggattctcattagacgccttcgctgaggggatacgtatttatgtgtgtgtgtgtgtgtgtgtgtgtgtgtgtgtgaaacctgtgtccgaattgtggaccaggaaaggggtttaaattatgaaggggtcgaacaactgtgtctgtcgattgtcaaataagaaagaaaaggagcaaccacccccaaatcctcacgcgttcacactgtgcctggcggctcgcggcggaatttctcgtcgtcggctagcggggtataacactgtgtgcgttcgatttggaggaatcggcgcgtgaaatcgacgagatccaaatttgaaatggggggtgggggacagcgaggggaagacgacggagaaagggaaagcctggagtcttgtgggagttggcgcattttccgcgagaaaatggatatttggtcatgctcaaaaagaggttttgctagaatgccattttgaaaatatgtttcgttaaaatgctaatatgaagcacgcgaccacagccactttgtcgttttctctaattttctccatttttgattttattttcgctggaatgtggcttgatgagacgaaattgccttgggacacagcgagcccagggacacggcgagctcgatgatgtgaagctcgccggccaactggtcgtagaagaactccttcagctcaatcacggcgagcacctcggcaacgccgacgagcacgtgctgcggcaccagccaccaaacatccatcggcaccgtcacgtccggctggtccattaggccggtgtcgcgagccacgcggagccgtctcgcctcgacgagcgccgccacgaccgtggcgaggcaggccgtcgccatgccagcgccgacgcgctagagcatcgtgatgccgtcgcggccaccgccagcgaggcgcctggcgagcggcacagccatacagtcgtacaccggcagcagcgcgatgtaggtgaagctgacgaggcactgcagccccgccgacggcacgacgaggccaccgccgccgaagcgccgctacattaattgtgctgctctgcttggtgattggtgaacggagtggacacctgtgagacgacgatgatgaacactatgctggtcaaccagatcggaagcaaccattgtcgtcgccatggccatccaggcatccacctcctcaacttgtgccgttctcgttgacatagctgagcaaggtggtggagatgacgtagccccagtatatggagaagtggtaccaattgaagcaggagctccgcgacgcacgccgcacgcctccgccgttggcgtcattgatgacgacgacaccgtctcttttaaactggtccgcgccgaacgccatgtcgcactcgcacggtgtgtggaagccctccgtcgtctgcaagctccggcgccacatcctcaccgacccgagcttcgtcgcacaccaccgtgcgttccacccgagggtggcggcggcgaccagagtgctcggcgtcttccacaacccggtcagccacgagctggaccgcttcatcctgaccaccgccacgagctcgctgttgttcggcgtggagaaggacactgctgccgcggtcaaccttaccaccgacgcggttgggaacgagggcaggaggaggcatcgccgctgggtgcggcgcagcgcgcggagaaggcgaccgcggagtacgcgcgctttatgcggagctcagcgaggtggtggcactgcatcgccggcggcttatcaggcgttctctgtccttgccgaccaccttatccttgccaccgtcgaggatcgtcacaccgcccctgccccagccgcataaatcccctttcacccggctgccattggtccccagcgactccaagtgctccacgatgtcgccactcgcccatggcgcgcgcgtggtcgtcggggaggctgtcggggatggacatgaaccggagccaagtcggcggcgagagtggccgcggcaccaccaaggcaccacggcggcggaggctgtggtctgtgtagaggaaagtgacgtaaaggccagcgccgacgaggcctgtggcgaagtgcatcatgcagttgatgtggccctgccccggcgccgggaagacgagcacgtgcgccgccaccgctgacgccatgttcgtccgctcgcgccgcttggtcgccgcggccgttgctgccgacgagatcgccatggccggagagaggagacgtcagggcgctcgctcgcttggtcaacgcccgccgccggccaccggccaccgcctctccgacggtgtcctcgagagagaggaagaggggaagaagggaaaaagaggtgagagagtatgacaggtggggcccgtgtcatgggtattttggtccagggaaagcattctagtgaaaaatgatttcgaaaatgcacaaaatggccaaaatggcaaagtagcagtgaacacgcgtttcatattgacattttaacaaaacgtgtttttgggatgacattctagcgaaaccaccttttgaacgtggctaaatgtccattttctcattttccgccaatcacccgcgcgtgaaccgtccgatctgaatgggcgttggctctgagccgtcagattctttgagaggtgtggcggtccacggtgacggtgtgcgagatggccgacgacccacctctactgtgacagtgaaaaaaaatcaaaaattgtcacctatgacatcgatgtaaacaattcttatatcttttcttagttatggccctggtcggggaaagtccatttccagagttgcacgaatccgatttatatttcttaaccgcaaaattgggtatagactctccttcattatcaaaaccggctcatttacctccttggcagtttaaacggtggtttcatcctacatagtgcctttttatgatacgttgactaagtcttcatctgacgtggaaggtacatggtattacatgtaaggggtgtttagatctagggatgtaaattttttgcgtgtcacatcgggtattatataaggtgtcgcatagggtgttcgggcactaataaaaaaactaattaatgtatccgtcagtaaaccgcgagacgaatttattaagcataattaatattttattagcaaatgtttactgtagcaccacattgtcaaatcatggagcaattaggcttaaaagattcgtctcgtaaactagtcgcaatctgtgcaattagttattttttagcctatatttaatactttatacatgtgttcaaacattcggtgtgacagggtgtaaatttttagggtgggatctaaacaccccttaagtctctcgacagaaaaataaaaattttacagcaggacacatataacatcccctcctacccacttctctcttcctcactctctccctttctttcaacggcaacggaggaggaggaagaattgatgaggctataccaggagctaccgcaaaggttgagcgctgaggaggtggaggcggatacggcggtgttgaccttggcggaggacaagaacaccacatgcctctcccgggtgaaggctacggtgttggtagaggatggcgtccctagagagccccacgacatgctgctggagatgcgggaaaatgttgaaggccacgacgtcattggagaacaacgtcccaagagagctccatgacatgttgcgggagatgtgggaaaatattgtggtagggaaggtggcctcaagccctcaatagtgatggaggtgggcaaaaaaggtgttatcgccacaattagctgtggacgcactaccaatattatattggctttaatcatttttccaccctttcacctatgtagatactctagggacttgttcggcaaatatgtagcaaaaaaatacaggattctgataggattgtataatgcaaaacaaatggttcaaaacaaaggaaaaatacaggattcgtggtttaaatagataaaaaacacataattatatatatgagagaaaaatatataaaggaatttttttcaagatgtttgagctcttgctaacttttctctctatatgattatccattccagagaaattttaaaagaaaaggtaagattccatcctccatttcaaaggaaaattcctatatgattgaaatcctacaggtttcctatatttttcccggccattagatgtacaaacaaggtgcgatagatttggtattgttctcttgttaaacaggagctgctctgctacaacagtaatgactttatagcctacaactacaaagtacaaactgcaaagcatgtaaactgaacaagaccaaaagaatcctggggcaaacatcttataattcaagtggtcatgtggcacaacgacctaaaaccagatgatggaccaccagcgtggtatttctcttattttgattgctgaatcagaaaaaaaaataataccgttgatgaggggcatgtgaagacgattatgaataatccaatgaaagcacttgatccaatctaattaagtagcagctaggttgcctgtttatcttccacgaaatggagcaaagacgataattaaccaacaaaaccacttacgagtcgatcactcactcaaactcttctacctctcctaagtgctgtgctgaccatgatctgttcttttagcaacataaactaacatatcctcccccaggagatcaaaaggctgcaggcggagaagcatgagggaaagtggtaataatgatctccattttcttgcaagttgagtgcaattacaaggcgataaggatcattaaacttcagattaaaaaataaacaccaatcggcacttgagctgcatccagtaagaatcctcgctttctagtcagatagatagagttcggtgtaagttcagaatgacaagcctgctgatgagagatccggaaccaaaaaaaaaaaaaggaaaacatgaatctctctgaagatgtctgaagagaagaccagcctccggcatttcagcacgcaaccgtgacccgcactggatgatcgacgattcaattatgtgaggtcgagttcgagaagttcatataaacaatgagggaattaattcatggcttcgattacatttctcctctttccctttcgagcccggggactccctccctggcagcgacgtgctcgtgcatggcttagctttccaaaagcgtgctactagctctttctttctgctttgctttgctggcctgcacttggcggcctatagctcgatcgataatgaataatcatgcaagaggctgatgcaggctagctctctctctcatcacacacaggagtcgtcgtctgtgatctctccttcaaattccatctttcttccattgggaccaagaacgtctggattctggggtcgtaattcgatcgccttcttttcgcattcgcagtcggtttttcggtatgttcatgtgaacaataagttgtcttcatggccaagcaaaagctttccttcaggtaatgatggggtgtaaactgggaagtgaatttttttgtccctcgaggggacatcccatcattttgtacataacgtttaaaaaattatcaaaaaagatttaaaaatttgtcaaaataaatcaatatatgatatatcttttcgcaaacatgcaagttaaaattcgacttatacaattcgaaacaaaaataataattttgatcatgaattgtacgttctttttatagtcaaatttgttatttttgtttctacttgtataagttgaatttgaatatgcatgtttgtgaagtgacgtatcacatattgatctatcatactaattttttaaaaaaatttgtgatgactttttaagtaacatgcaaaaacgaggggatatccccttaaggccttgttcagttacgcccagattcaatctgggccgagaatgacaagtaagaaatttatgatagatacaatgagagaccgagatttattccgtgtcgggaaccaatttactcatattaagtacaacaaaacatccggattagttccacacctattgactagtggattgattctcggtctcttattgtccctatcacgaataaattggttctcggcccggaataaatcccggtctcttattgtatctatcataaatttcttactatccttgtcattcctggtctggattgaatccgggcgtaaccgaataaggcctaagggatgaatagagtttcactgtaaactgttttgatttttttttctctggtgtttcattggcgttctggtatgatcagagagcagaaaatgcgcaatactgtttggtcagtacgtgctattaattcaagtcccactaagataaagatgataccattgcaccctgaataattcaggtgcaacttcaacggttaatgtgtactgatattctcaactaaaatctttgagcccctgcagcttacaataaaagacgaagattctttgacacatctctgaatttttttttatctaaactaaaatcagtgctgcttatcgacaagtgtccattgattaattgcacacacccatcagaggatcggcactaagccatgcaaggcaagtgccactcgttgtgcactcgtgcctagttggaacctatctcggtttaggcgttaattaacaaagtggttaagcccttaatggccacccataaaaagcagccaaagcaacgaaccgcgagaatccagtggcctaaagataagtgggtgcagagatatgcgagaatccacaacgcggccaaagaatccacccctgcgaatatataatttccccgcgaggccgcgagccccaaacatcgcctataggttaattgctcagagtgattcagttgctgccacgagatgtggctatataaagagcttgagatgcacccagccatggccagagatcaattaatgctctaacacctgtccccatctgaatagcccgggagcttcctcgcgaacgatgtcgaggaggaggaggaggaggaggaggaggaagaagaggtgccaagctatcgcactttcagaggtgtgaagtgttgtgagtgcgagctgcaggtcgggacgaagcttagcatgcttgctgccatggcttccagcggtggtcggcgagcgagcaggcggcggcggcggcagaagaagaaagaaggcaagtcttatcggcaagggaaggctaagcctttcttccaggtctccctctctccatctaaatccgtttttggaggaggaggagggggctatctcgttttagctaatctgttgtgtgtgttggtgatggtttcagttcagtttcagtttcatgtttgtgatcagtgagagtgatggtgtgtcagtggtggtttagatcatgtgttaattagttctgtgggcgtgtctttgtgttggatcttggggttgggttttcagaaaatactattgctgtggtgtgtgtgtgtgtgtgagtgagtgagtgaattaatgagtctctgaaaattctggaataataagaatgtaagcagatgatgtatgtgccttggtgctacttatatatgtgctctcgttttctgatattacagatacatgagacactatatattcatgctactatttgacagattcagttgtttgaaaagggaaaaaaaaacaggctagttaaacatattcagtaagacagttatctgaatagatgagctttattgcatccacattttctgaagcaccatgtctcttcttctataaattcagttgtttgtaaagggaaaaaaacaatataaacatattcagtaagacagttaactgaatagatgagctttatttcatccgcattttctgaagaatcatgtctcttcttcttcttcttcttcttttgaaaattcagaagcaccatcccatagtcgggatttcaaatatgagggagattttggggttgtttggatcgtttgtttgatgttgtttaggattgaaccttgtttgtttgtttgtttggtctgacagaatccccgatatgaaaaacaaagttttctcaaaaagagctatcccctttcctcaaaactgatagctaattgggttccataattcttattgttttggacaagcttaactttcactaataataacctttaaagtatttagtttgaacatactacaacacaacgtatagattactctcaaaagttactttaataaacttaaatatttattacttatatatatataccgcacatcctataccgcacccaggtgcgtaataaataaaatgctccccctcacatcctacccccaccccacccacccacccactccctccccacccccacccacgcctaccgttcccagaggtactccgtattagaatgtcgttcccagaggtactccgtattaggatgcaaccaaccaaaacccaccatccgggaaactattttaacagctcgagtggacgtctacccgtttattgcatatcatctaaataattatgaaaaaaattgaaaaaatatgaataagatagatcaatatataatatatcaatcgacaaacatgcaagttaaaatttaacttctatagtaaaaaaataacaaacaaaactcaaattactatatgtatatttgcaattaaatttgttatttttgttacaacctgtagaagttgaatttgaacttgcatatttatggagtgatatattacatattgatctatcttatcaatttttttaaaattttttcgtaaccatctaattgacatgcaataggatggacgtccactcgaactattggaatcctctccccccaccaccctattttaaaatttttcgtaaccatctaattgacatgcaataggatggacgtccactcgaactattggaatcctctccccccaccaccctatttttctggatcgtacaccatccacttccacgttgatttcccggatcgaacaagagggagagggcacaggcggcgacggttggcggcgtgcgactgttgactcgggcttcctccggcggccggcgacggcgacggcttgtggcagcggcgggcgggcggctgcagcatgcgacggtcttggcgaggccgtaccccagggcatcctcgtcctggcctcgccgccctcgacctcgattcgccctggatctcgatgccgagtttggatctggagatgcggggtcgcatcctcccgctgtcgctagccgattcgccttcttgccagaccatcaccactcttctcgtgactgcgagaggtacacatcggctgcaccaatttgctctctttttgcatttttctcattgtgtgggcagtggatgtggtgaaggagcttggcgcgtgaggtcacgatgcagcccaaatgcgatctgcatcacgtggttcaatctgatgcgtgcgtaggtcaggagtctcgttgagtccttttttttcttttggactatttgaagctctaattttttggttgaaccacgttcttacgatgtgctagaaattcttttttttttgtgtgtgttcgaacgtgtgttcctgattcttttttggtgagatttcctttcatgagcttcacgttcaacagagcatctaagtaattcgtgttccagttgtactccctccgtcccctccgccccccccccctccaaccaaacaaacctttggttttcgtgtctaatgtttaaccgtccgtcttatttaaaaaaatatgaaaaaaaaattaaaaagacaagtcacgcataaaatattaatcatgttctatcctctaacaaaaataaaaatacgaattataaaaaaaaatcatataaaacggacagtcaaagttggacacggaaacctaggatttgactttttatgggacggagggagtatttgtttcctgagttgattgataccagttagtggagtatgtcagaaaacccaaagcaaagccgtggtgatgagagctacacatccacataacttgtttctattctgattttactgactttaatctctgtgttgttttagggtgagtttgagggataggggattgaaaagattggaaagatacgcaaaatgaagtgagccattaacgcatgattaattgagtataaattattttaaatttcaaaaatagattaatatgattttttaaaacaactttcctatataaattttttttgtcaaaaacacaccgtttaatagtttggaaagcgtgtgcgcggactacgatgtgatttctcaccctaactcaccagaacgaacgctcccttattgtttttactgtaacgtttctgaaaatccctgattgaacaagcactcaaggaggctcccgaaattcgacatatattaaggttgatgagctcgctagtacctagtacttggttatctgaaattttcttgctctattgagcagctgggatgaattggagcaatcatgtggaacagagccgtttggatgtattggtcggaacattttgtgcaaattaactttttttgctcagtatatacccatagatatatgatgtttcatttgactgactgactaataagtttcctgttgaacataccatttttactctgtatatttttgacagaatatacttcttcagactaaggtctaaattttactgaaattattaacttataattcttgcaggcgtcagcagctgcagtgtgcactcttgcagtggatgctctgctgaagacgtacatgttctaaattttttggttgctcatctatatctgaattttctttttaatcgtgaattcatctgtgtttaggaaactacgtaagaacatgagaagattatgccagtggtggtggtgccactggaatggcatcctggtcattatcctcgacatgtctgccgtcaacgcacgtcgccagcggccaaacacaaagagcaggggtgacgcagagatgtcgacccaggacgagcacaccacaattgatgaccggcttcggtggcaggcgatgccaaaaatcttcacgactgatgccctctggactgataatttttgacaacgagtgtatatgtgtgtttgtaacgatgatggcacgatcaattgaagaaaaaaaccattatacgtgtattctcgtgtagtaaaatatttactgccttaagcacaaagcaatttatttactgagaaaagacgaaactaatatttcttgccatatcaagagtttttactgagagaagactgagagtaaattatttatcgagagaaggacgttggtacaaaaatcaggaatgagataagggcgcagaactatctaagagtaatacatttagtgaaagaagaaatcgacagagagtaatacatctagtgaatgaagaaatcaactgagagtaaatagtaaagtaatacatttactgaaaggagaaaatcaactgaaagtaaatcgtttactaagagaaggatgcgagaagaaaaaacaggatagagaaaagatgcgaaccagggtgcatgtgggggcggttgggggtgtggagtcgtttactaagagaaggatgcgagaagaaaaaacagaatagagaaaagatgcgaaccagggtgcatgtgggggcggttgcgggtggggaggagagagaaaggtggtttcctggtgggagtgagggggggtgggggtggagggtaggttgtgaggggagcgttttagttattacgcaccctggatgtgatttagcgctgtcctatatatatttgtttgtttgtttattaatataaaatcatagtgaaaaatatgtttaggagattgtgtcgttgtctaaaacatcaattaattatggaactagagagacgataccatgttttttttttgtgaaaacttgttgagttcccttttctattctttcgtgggccaaacatgattattatacttggtgataccatgtgctttgctacggaatatatggatgaaaatatgtttaatattatagaaatgataaatgttgaagtattgtgaaaatgatgcgaggaagatgatatgatatatgttgagctctagtattatattttgcatgattagtcatgcttgtatgatatttaaaatactctataatagtaattgttagtgggtgatgatgtatcatacttaggagatgagtcgacaataacaaattaacatagtaaacaaacaaaatttagaaaataataataaaatatcgttatcagaaaacaatatcttattttccttacccatacaagcactaattattatctctaaccggcctatagtcatgtataaggggaaaatcttttggtcctgggaatggcaccccttatttgttcaaacatataaatatttatgggaacttcttaaaatatttgactacaattatgtaggatctaggtctacaaaatttaacttgattcacacatcaataattttttttaaaaaaagcatataagcaatacatgcattgttctgacctagatttttttttaccaaacttgaattttggtgaaatgataaccatactctgtattgtcaaattattacttcctccgtttcatattataagactctctagcattgcttacatttatatatatatatatatatatatgttaatgtatgcctagattcattaacatctatataaatatggacaatgctaaaaagtcttataactaaaacggaggaggtagtatatcacaatatgtgtaagggaagttccctttagatagaatgcatcttccattcgtttagctgtagtatatgttacaattaaactacgctcggagggatgcttgttttatagccttaggcccatttggttctgactaacacataggataatgattaatagatcacttaaggcccacatgacgagtcgaaggaataaagttggccatatatcctttttcatagaaaaaaaaacaaatatcataaactactctcaggaatcttttaaaaaacaacttttttggcgaacttttataacttttgtatgtcaacaaacacgccctacttccgttgttaataaactgaagaccctattctctcactaaaatactttgtcttcactatacctttttcccatgatgttgcatttgtatcatttaatagccaactgttcacttatttcattgctcactcaatgttcgttaggccattcctaacccaataattaggatagtgtccatagtattaaataagctaccacatagaatgaaaaataatgtgacaagtgaataaatgaggaaagagaaggaaaccatgtcttgcatgagggcagttccaacccataacactagacatggtttctataaactccacatcatcaagaaactagtagtagacactactgttccaatgcaaataccactattccatacttcaatttaatgttacttatctcacatgatgttttggatgttgtgtagaaactatgtctcatgcaagacatggtttccttctctttcctcatttattcatttgccacatcattttttatcctaggtgacaacttatttaatgctatggacaccatcctagtcattgggttgggaatgccctaatacttgcaaatggagctatcagcaatcaggtcgatctgactgaaatttctggtttaattattttgttattctagttgtcaacaaatatccagttattataacatgagattattactctaagacaaaatactaggatcatgaaattgctttggctcggtacatccacacttattagataaacaggtcgaatgctttcactatccttaatgaaatattccattatctagtaaagtctatagtaataaaccatttcttttttctctcctcccttctcaaggaaagataaaccctatataccaaatgattacatacaccttacacgtaccacactttacatgcccttaatttcttttaggaaccaagctttactttacatgctctgctacttggttcactttgtgataagagaaaaagaaaaaaaaagagtccaatttactcccccaaactatctcactgaatcacttaaccccctaaactattttgcagctaattttacccttgaactattaaaatagttcactttactggttacttacatttcacttctttactgatctttttataccagcaatattttaagctttaattttgtagagccatatggtctcattttttttgcttatgcttttatgcttatcagccaaaatttaaattttcaaccttaaatttggagctgattttgaggtttttttcattgaagcttatttttagccattgcttttagatcgctaagaacacatctataaaagttttatttacaaattacttttcatttgcagatatgaagtttcgcttattccgcgaataagcgaaataatggctccgatagatgacaccattatcaaagttcaaaaattttcatgactttctgcttgaactttaaaacctctatgttaaattagtcttagtgcttccaccctagtaaacaacgattcacaaatttcaaaaaatgttgagatataagttataatgcataaatatatcccaccatttatcattgcaaaatatgacatatagaaagagaaatgaaaaagaaaaatactcttagagaataagacgaaccatttttaataattcgaggtgtaaaatgagtcaagaaattgtttagactccagcgaaaagggttaacccggaagtgatatggttggagtcgcttcgtgtataagtgttaacccggaagtgatacggttgaagtcgcttagtgtataagggttaacctgagagtgcactttcgttctcgcttcgtgtacatacagtgaatagtgatatatgattggagggacaagcggacgttgtaagttggttgcaaccacacaactcaggcaggctcacagcccaaccagggaaacctacatctctggcccacgaggcccgtttaggcccaggagcgagtccacaaaggcatcatcgcatacgtgggttgccgaatattcgctccgcttcccccctcacgcgagatatttcctctcccccggtgggccgagccgccacgccacaccgccccctgtatcgctcactcgcttactatatagccagaggggagggagcgggtagggttttacctcctcccccccgcagcgccgccgccgccacacactcccccacatctccccttcccttccactcctcctcctcctcggatcgggaggcggagcgagcaatcccccaaggtgatttcctgctgctcttctctcatctccccccatcctctccgttgcgtgaatctgttgtgtggttcgtcgtcgattatcttagctaggctagattcctcgcggtggtggtgatttgagtgcgtccatctggtcaaaggttcgaggtaggagtagtagtatgtgtgggtgctctcagttcgttgcatgtttgggttctgtatctggtttggattatcatgtttagtggttggcgcggtagttgtaaatctgtggggttttgtcacgctggttaattttttggtttcgtcccggttccgatcgacgtttctttgggtcgtcaggtgtagcgaatggatgggattggttcgatccgtctggtagggattcgttctgctcgtagatctgctgtggattgctttcgcggtcgcctgctggagctaatttggcaggattaggatggttacccatttctccagggcagatctatgctatgttcgttgattggcgtgtgctggctacagacttgttcatgttgttcactagattgttaaacatgtgacgtcagccggtgattgcttgtctgccacggttttgtttgttgtcctagtgaaatatgcacagatacttaagggccgtgtttttgttttcacaataatggcagtagatgagttgaattcagtttgtcatatcgtttttgtatcaaaacaagtttttttcttactggttaagtgcttctcgcggtcccgccagaatttttatgtactgggtatctctgttatgagtactcccatatcctgcatgtacagtactgcagtggtgaattggtgatgtgctgatggtaatgaatatggcggaagtgtatcagtttgctgcttttgttacatttgatgtgtgttttcaagtttcatcttttttttcttattaatgctgcatctatcaagctgtgcagtttttttctttgatcgtcttaaacctaacagtgtaactgcatcagtgtggtatttggaggtagtattagtaaaactggacatgttaaaaattcgcatttagtaaaactggacatgttaaaaaatcgtatttagtattttgtatcatgtatgatgcttaatttttgtttgcgatatcaattatatttttatttgttgcattgctatgtttttacttgagtcatgccgtgatatatttgtagttagaattttgattttaggttttgtgttttgcatggttctaactgggtttctttttttggtacaggaatttgtatttgtagcgtgatttgcaaagctagtcaagatggtgaagttcacagtagaagagctccgccggatcatggacaagaagaataacatccgtaatatgtccgtcattgctcatgtggaccacggtatgtgccagaatagttatgactggtgtattaatatctgatcataatgttattgttgggtttacttcaattggttatattccatttcttatacaattgacatttgcaataataaattcatcggattctgtgacatgagtcgatcacagtcgatctctgcatgattagtgccacaattacttgtgcaagttaattcatttggaaggtggcgatcattttaatttactctctttgttgagacggggggagtagttaatagtttgatcattactgtgtgttagcttaaatatttatgctgctgtgctggtcaccaaaatggtatgctaattttttgtatgtgctattttgcaattttgcattggaagaatatgttgtgtattatgctcttttatttaatagcttgtttacttttgcttattgctaatttctctttttgatatgtcatgctatgctatccctgtctgtttacttttttgttagtcccaagttcaaaaaaatgcttactattgggatcctttcaagaacaagctatatatgtcccatctattttagatggctttgttttgtgcaaattttcagctttctatgccttagttttgtgcaaatcaaggtgcacttacatgctatgttctctctgcaggaaagtctacacttacggattctcttgtggcggctgctggtattattgcccaggaagttgcgggtgatgttcgcatgactgatacccgtgcagatgaagctgagcgtggtattacaatcaaatccactggtatctctcttttctatgagatgagtgatgaatcactcaagttgtacaagggtgagagagatggaaatgagtacctgatcaaccttattgattcacctgggcacgttgatttttcttcggaggtcactgctgctcttcgtattactgatggtgctttggtggttgttgactgtattgagggtgtctgtgtgcaaactgaaactgtgcttcgccaagcccttggtgagaggattaggcctgtccttactgtgaacaagatggacaggtgcttccttgagcttcaagttgaaggtgaggaggcctatcagaccttctcccgtgtcattgagaatgccaatgtcattatggcaacatatgaagacacactccttggtgatgtccaagtctaccctgagaagggaactgttgctttctctgctggtctgcatggctgggctttcacactctcgagctttgctaagatgtatgcttccaagtttggagttgatgaatttaagatgatggagaggctttggggtgagaacttctttgacccagccacaaagaaatggaccaacaagaacactggctcagctacctgcaaaagaggtttcgttcagttctgttatgagccgatcaagcaaatcatcaacacttgcatgaatgatcagaaggataagttgtggcctatgttgcagaagcttggtgtggtcatgaaggctgatgagaaggagcttatgggcaaggctctcatgaagcgtgttatgcaaacatggctgccagccagtaatgctcttcttgagatgatgatataccaccttccatctccgtccaaggcccagaggtaccgtgtggagaatttgtatgagggtcctcttgatgatgtctacgcaactgctatcagaaactgtgatccagaaggtcctcttatgctgtatgtttccaagatgattcccgcatcagacaaaggtaggttctttgcctttggtcgtgtcttctctgggagggttgcaactggcatgaaggtgcgtatcatgggtcccaactatgtccctggccagaagaaggatctgtatgtgaagagtgtccagcgtactgtcatctggatgggaaagaaacaagagtctgttgaggatgttccctgtggtaacactgttgctatggttggtttggatcagttcatcaccaagaatgccaccctgactaatgagaaggagtcagatgcctgcccaatcagagcaatgaagttctcagtgtcccctgttgtgcgtgttgctgttcagtgcaaggttgcctctgatctgcccaagcttgttgagggtttgaagcgtctggcgaagtctgatcctatggtgctctgtactattgaggagtctggtgagcatatcattgctggtgctggagagcttcaccttgaaatttgcttgaaggatctgcaggaagatttcatgggtggtgctgaaatcattgtttccccacctgttgtttctttccgtgagactgtccttgagaagtcgtgccgtactgttatgagcaagtccccgaacaagcacaaccgtctctacatggaagctcgccccttggaggagggattggctgaggccattgatgacggtcgtattggcccacgtgatgatcccaaggtgcgctccaagatcctgtctgaggagttcggctgggacaaggatcttgcaaagaagatttggtgttttggacctgagacaactggccccaacatggtggttgatatgtgtaagggagttcagtatctgaatgaaatcaaggattccgttgtggctggtttccagtgggcatcaaaggagggtgctctggctgaggagaacatgcgtggtatctgctttgaggtgtgcgatgttgttctccatgctgatgctattcacagaggtggtggccaggtcattcccacggccaggagggtcatctatgcttctcagctcacagcaaagcccaggcttcttgagcccgtctacctggtggagatccaggcccctgagaatgcccttggtggtatctatggtgttctgaaccagaagagaggacatgtgttcgaggagatgcagaggcctggtacccctctgtacaacatcaaggcttacctccctgtcatcgagtcctttgggttctcaagccagcttagggctgcgacatctggccaggccttcccccagtgtgtgttcgaccattgggacatgatgacctctgatcctcttgaagctggctcgcaggcttcaaccctggtgcaggatatccgcaagaggaagggtctcaaggagcagatgactcccctctccgatttcgaggacaagctctaaatttttggccgccgcatgtgttgtgccgttacccttacatgttctagttggtctactgctaagagaactgctttcgttgtcgtatttcatttcccttttgtcgaatgcatgtgtttcacatcaacaatcctatgttcgcgtgctactgagaaactatttttactctgtcgtgatgtaacggatgtggaacctggatcatctttttgctgtctaagttatagtgttcacattcttgttgcgtttctgttgagtggtatttattgtttcctttggcttgccgttgtaagtccgcttatttttgttccgttcttcctagtttgtagttgttacttggtagaacctattctgttgtgtgttcttctagtttgtacctggcacttggtactaccagttctgttgttctagtttgtaggtacttcatactatgacgtatctagtttgtaggtacttggtactatgacgtatcttgcctgttctagtttgtaggttactacgacgtatgttgccgtttgatcagctcttttgccttgttaactcctggtctctgtttgatccgaactgttgcatttgagtaattttcccccgattgctctgaagtctatcttcgtgttcaatctcttttcatttgctttaatttcaatgggtcatgatgtcatcgacttatttctaatgccggatggcatagagcagggtttaccaaattgtttgggttgggttatcgtcaccttccggtttaaccacgtgacggactttagttagagttaaactactttaaatttaactaagtttgttttttttatgaatatagttatactaaattagtttcattaaatcaataattgaatatatttttataataaatttgtgttgagttaaaaatattattattttttctacaaacttaggtaaatttaaagcattttgattttaaccaaagtcaaaacgtcttataacctgaaacggatggagcatcaagttaccatctagtgttacaaaacgttcaattcccttgtttaatccctaatatttgtgttattcagatctgcttattctgatcgcattccctgatcgcttgcatgatattgaactcaactcacagactccacgaccccaaaatctaataccgcatcatatagtaaggggaaagcaatagccctatttggaaaacttaactatataggaaacgctaacccatctgaaaaagccaagtactccctccattccaaattgatgtatatatagttttttttaattattcctaaatgatttacatatttgtgttcattcattaagtctattcgttatttgtgtattggagtaaatggacattaatgcatgcatcgatgcacacaagtatttataacccacatgcaatatcttgatttgctattaactaggaaatagtggggatggtgcatgtatcgagtttgttgctagtgtaaatatagtataagagagttattagcttttcttgattttggtgtacctatgaaatatgtagatcaatttggaatggagggagtatgtcatagtctttaagtgataaagattaactaatagtctctcttcttacatgtccttagtccacctaattatcattttaaattaattggttgggtcctatcttgatagaagcacaatcattttggagaaaaaaattttaaatttttaatgatagtagaaacacattctttttaggacggagcatataataattagttgaataaaaataaacacctgaagattgcattgaagcgccagcagcaacacaaaggagcatgtgcattccgactgatgttttacactaacacacagtgacacagccacacaggagtaacaaacaaccaaggcccattacaaaacattgggccgaatggactcaaccacgaattaatacacaccaagactgaccagctgattattacacgcgcagacaacacacacgaggttaattaacacgcgtacatgacgccacacgactcgccacaccgaagcgttcgtaatcctccggcgggcgcgctcgccgccgtcgccgatccgccggcgacggcgatcgacggcggcgtgtctcagtagtaatacgaggaggacgacgacccgccgagctggaagccgtcggcggcgacctcgtcggccgcgggcatcggcgagaacatcgggctgtgcacgtacccctcctcgaagtacaccgccgccgccgccgccgacgcgcccgcgtcgtcgtacccgccgaactccagctccgacgcgtcgcaccacgccgcgccgccgccgccgccgacgacgtcgaacacgccacccacattctgaccgccaccgccaccgtaagccatttcctgggcgtcgccgccgtgtgcgggctgagccggcgccggcagcgcggcggcggtctgggtgtcggcgccggcgccggcgccgtagtagtggcggtggaggtcgttggtggagaggtcgggggagaggtagggcgtgagggaggagcccgggggcaggtccgggtaggcgaagttggtgcgcgcggcggcgccgcggatggtgcgggcggcgcggtcgtaggcgacggcggcctcctccgccgtgtcgaacgtgcccagccagtgccgctccttggtcgccgggtccctgatctccgccgcgtaccggccccacggccgccgcctcacgccgaggtatctcgcctcgttccctcctccacccccctcctgctcccgctgctgctgctgctgctgctgccgcctcgtcttcttctccggcgccggcgccgacgaggagaagaagtagaaatccatactcttcgagagatcgaggagaagaagtagttgtggtcgttggcgatgaagctgctgctactgctgctgcatggggaggttgcatggaggagtatatataagggcgggaaagcttaaaagttagtggggaaatggattaaataagcgaggtggtactaatgggcgatcttaagcatgattagcagcaggagtaatggagggaaaatgtaattggtgccctttttaaaaaaattgattcgtttgtgggggcggcaaaagtggtcaaccaatgatttgctctggtggtgactgcatgatgcatatgcttgatgggatgattaacatgcatggccgacttagctagttagctctggatccatcatactaaccttattaatattaaatcgagtttacatatgggaattatgatagtgatatgctcaagtattaattaataaaatttcctctcatcatatgtctatatcgatatcttccatgatagatttgctgggagtattgcagactagtaccgaactaccgatgttcagagcaattgatcaagtgggagttgtgttaggcttgcaccgtccagagtcaggcagaagtacagtacttacttctaaattaaacaataagtgtattatgtatagcaaagatagatgggaatccttttaccatcatataatctggctggtattgcaatttatacaataagtactatgcataattaaaatgcttcattttgatgtgggaagatcatgtgctgatattcatttttgcccttctgttatttcaaatgcgcaaaatcccaaatcctgcaaaatgaatacaaaatacataaagtgctattgtccatttacttttacaaggggcgtgcatgatttgacttgacgggaggttatattgctggcagtaacaaaaaataagtgatatatagtagagaaaatgttttcaaagatgaattcaattgtgctgtttttcctgtttcaagatatacttactgttggactaattgttagtagagagctcgcaaagaatgaatcttggagtacatgggcggcctataaaatcaacacagagagtacccactaattaaggttcaaggttttctgtccaagatagagaatactaagcttattattcaaggaaaaaaaatgtaataccatcgtcctccagaaatagtctattacattcatgttatacctatctataggatctataaataattcgaaatgaagaagacaatgaaacatatatcaactggtcaaaataggaatcatttacacaacagaagtataaatgatgaacaataaactacaagattctgacttataatatgcaacttctgggacatattaattttcctatacgttggttgcgaaatgtgtacaacaagatccaaaccgaccaaactgtgattctgattattctaatgccaagttgcaaagattagtctccctgtcatgtgttctctcccactgatgtcttgatttcactgtccaagaccacaagtcaaggtcaaagtttgtagggggcaagaacggcatgaaaatatactggtcctaatgcaaactctaacttcacatgccgccttaatacctgaggtgattatcgttttcctgcctttgattgactagattagctagctacagaagatcgcggtgtgtgtagtgtggtctacctacacaatatttttctattcattcgatcatgctcaagggatcaagtgaagtaatcagtagataatataatgggatctaatataataatgatgcctagcactaactaaagctaactagctggatgctcagtaaatgaattgggccattggattgtactgtacctaaaatctacaaagagagattttataatgttctttattgatagtagaatttatctaaacattatattgtgggcagtctcggcggtagctttcttattggtctggtgatcggtccagtgttaggtttctgctttgactctgtgtaggggctattgatgcgtggtagtggttttttttttcattcctgaccactaactttcagggtactagctaatttgtaatgttttcgtactctatttaatgaaccatcattctatctggtgctgatcgttaaaaaatgaatttttctaaacattttatttttttctaatctaatatgtcatgtctatttataccagctaccatcttaactatataaggtattagtataattttttgtattagtagtagaaataataaatcaataatactgtcaatagagactacccttgatttgtagcgttccagtagtaaactactcctatattagttcaactgaaaggtgaagtccacagcagtatagcagtttgtcgccggtttggctgggatcatgaagggcgccattattatgttgcttcccaaattttgctgcgctatatatatagcttatgaaactctctagcgatcactagcaaagtagcacgaactattgatgcagtttcagcaaagagcaagatctgtgcgtgtcgtgggtcattatatattttttttcacgaacgcgcaaaaagattgcacgtcaatatattagaggaatagagtttttgttacacaccgcaattggccagaccggcctacgtcagggaagggaaaaaataaagttaaaaaacaaggaagagaaaaaagaaaaagaaaaactcgaatgctactccaaacaacgagaagggtcagagccacgctacactcccaacaagttcccaaaggaagcaacgctcactaacgaccacaatcggccctccgacaggatggactcttggaccactgagaccgaagagagcgcggagtcaatcaccctagagttacgttcctttcatagctgccacaagaccaggaggaccagggagtcgaaactggaacggaggtgatcaggtaaaccagcactggaagatggccaccaaccctagagccagctgccacggggggcgagagggcagtccagctaggaggcgacagcacccgtaaccagacctgacgagcgaagatgcaatcgaggaggatgtggttcgccgtctcgagctcttgagcgcaaaaggggcaggccaagtggctatcgatgccacgcttttggaggaatatatattcttattataaataaactatgatcaaattgtttattgtagtaaatcaaactaaaataaatgaaaattttgttgcaccagacacaattacatttatgtgtgatgatctaatttcttatttgtaacaatgtgttgatggagttgtgggtgatgacttaattaataccaaggtttatatcctggtgcctataaatatattacgctcgtagatgtgtgcttttaatagaaaaaattagtgaggtcagatatttgctgctggcctcctaaacgtgtgtagagacatagtgcaggagcatgcataatggaaatgggagcatggtagtcatgggagactgcgtatgaggaaggatatcccttccgtcggtacccttcgatcatttgctggtattaaatgttaataacgtagtactacctccgtattgtattttaatgtatgacgctgttgaattttttttaacgtttgaccattcgtcttatttaaaaaatttataaaattatcatttattttactgtgacttgattcgttatcaaatattctttaaacatgacataaatattttcatatttgcataaaaaatttgaataaaacgaatggtcaaacgttggtcaaaaagtcaacggcgtcatacattaaaatatggagggagtactagttatgaatatattttttttgattttttttacgatccaaaggtgaaggtatggaaatcttaggtttttaatttaatgataaaatataatatctacttaagttcaccactataaaggtatgcatggagattagaaagatttacgttaaaaatatggcacctactccggtaccttaaagaaaaaaaaatctcaactccattttttaactgcttaattagtacactagatgggacatgtttggtaggggagtacctatacatttttcgaaagatttttataatcgtatcacacagatttttaatctttatattaaaatccgatagatataataaaaagcaaaaagcaattaagaaacaccataatgaacattaaattaccatatcctcaagaaaaagaccaaatccaatacaaaatttaaaatttacatgtgaagattcaaaaattacagtgtaacttacaaaagttacagtgtaagtttcataaattacactgtaacttacaagaaaatgcactgtaaatttgagtgagaaaatcgagtgagagataagaaaaaatctttcgagtgagatatagcaaaatcggtttggtagagctcatcacccagctcctgaatccttactgaatatggaatttgttggctacaatagtaaaagtagtttaattaatcctatatatatttttatataaatgtgattaagatggctcacccaaacaacattattctacccctagctctatcttaaacaattccggatccctttgacacaggcccatgcatatatagcttcatgcttactaaacgggaaaataaaaaggaaaattggtattaccatgatcccgaaaaagttaagcttgtatccttctggaagggttgggggcggtggattaggacgtaattaaataagtgttagctaaaaagcttgaaaaaaatcaatatgatttttaaaatatttttttttataaaaaagtaccatttagcaatttgaaaagtgtacgcactagaaacaatagaaacaattgagtagaagttaggaaaggggaaaaacacaccctacgactgggttcgtttgtatggttggagagagctaatcttttgtttattgtgagcacattttctaaactattaaacaatacgttttttaaaaaattcaatatcaaaattgttttaaaaataaataaataaaattttaaatttataatatttaatacttaattaatcatatgggaatcatcggcaatgttttctatgatggtgaatagctaagccaaacagctacatacctcctccgttcaaaaaagaatccaatcttaactatgaacctggacatatgcgtgtgtttatagctaggatttatttttttcaggacggagcagtagaacgtagcctaaaaaagaatgcatacatgatccatcttttcctagaaatatacttgagaaaatcttggcaataatctaactgacatataacacgtcacacacatgatgggcgatggaggagcaccccttagctctgccccaaagtattgaaacaaaatctaagtttgtgcgcatcaatcgattgaagtgcgcgtgttcgttgaaaggtcataagagagtgagtgatgatatcgcgccatatatctttcaatcacttttaaagacttcttatgattgccccctgatgcaaacgaaccttctaatgatgagaagaggagatggcactttatattagattaatgtaggatttgatgatcagatgcatacataatagaactaattagacttgttgtatgcatgggcccaaaggcacaagtaccttcacatgattagttgggttcagataaatgattggcatgtgcctccctttgctttaagatgccccttcctcttgtagtcttgttggatccaggttttatatgcatagatcaattgaaagcttaaaacttttcatcacaaagcaagctaatcatttgattcattgtacatattaggataacattgtatcttttttgctgcgtaccatttgatacccactttaactgaaaagaagatcatatatgtgtatgctcttactggaaaacctgatcagtagtaacttagtagatagtgacttttttttttaatcaagtgatcttattttcatcgcacttgttggggcgagtttttttttttggggggggggggggtgggggatggtaagatttcgttcttttgaattgttatacaggctcacaactctgtttctctgcaggaaaagaactatgggagtatcaaaataatgaagttgaggaatgcataaaccaatatatttggtttattttggaatatgcaaatatagccaatgacccaaaaagccatcacaaaacttggatggaggcatggtccaaaattttgagaattagttaagtctttctatcgaagatctgagatacttgtatatgatctgatggatatgaaaatgagcaagattgatgatttctcatcgccttttctctttaaaaaggaccatcatgtgcatctaacttaattatttgtttttagagaacttcacatataggcataaattaataacacaaaaccgtaggttttatgattttgttcacaatgcaaaccacatgtcagacccaagatttccttataccccgggccaaatctaattgctactatcccatatcataaatgagacccacactaatgcaaaacaaaaggtacaaattgttattgttagtttcaaaaggaaaaaaaagaaaaacaatacaagaaacaacatctaacctcaaaatgacaactatattaagtgttatccatcgaactagcataggcacactgtgttgtcaaaatgctccttggtcatcgccaccaacaaccatggtgatctcgcggtaggcgaacataatcaatgcaacaacaatgaacaccttatccaacctagagtcgtgcaggtggaagagttgcaggtgccacatccctttccccgttatcaccggtcgcctgcgacactttagccatctaggccccttgatggcggtgctacttcttgatgaccacctacttctagcttttcacgacgatggatatgtaaataacaccgtgggactaatatttctgccgccgccaccccaactttagcatgcgcctgcagtaggcagcagccccaacggtggagtagctacccccggcatatggaagagagtccaactatgaacgtgccatagagccactgttgttgccgttgaggatttggacttcaacctgggcaatctgcgatgccagagcttgagggatcagagttcgcaccgattggcctctcgccgctggcggcgcttgtcatttcttctcgtctccgattgtgctctagtcacattgagagtggggagggtagccatggggggtgcaagtttgttcgtgggccggttttcattagcctagtccaagagcgagcatgttctccatcatgctcactcagctccgttcgatggcgaacgaatggagcagataggctgaatgtccctctaacgtagactgcagtacgttagatgatttagttctggaggaagtgggggcacatgtgtcagatcatctcccatgagcgcgtagtgccgtagcagtagcaaaggggttaggtaataaagagtattggaccatagatgctagcctgatgggcctcgggccaaaccaataggggctcattgctagttgggctagaccctgggccatggcctaggatagtaaaaacaaacaatagcttaatttccgtgttatttggtttgaatttatctcctaaacttcaagcataactcaaatttgagaacctgtttagcttgatggttattgttttatttacaaaatatttttatttgccaccaaattaggttttctttttagggggagggggagaggagtgacttaccgtgcatttaattttcttataacaaaaaactttttttttttaaaaaaaacaaacataacaaaaactttaggataccactgttcgagaccttcaagtgttgtgaaaaatcaaaagttaggttgggtttaaaatcaatatttttgaatagaagagcagaggtgtgcccctctcagcatgacaattcaaccaacaaaggacaaacaaaaatctgtaaacctcataaaagttaatatggaaagagcactgctacacgtactctaacacatactatttgcagtcaaatttgttttttctgttaaatttgaacttgcattttttttggggaaaagaagatatattatttagattttttttagataatggattttcattaatccggcctctatatccacgaaggatatacacagccaaatattacttagaattagcttcctctcttacaatatgtgatacggaaggacaaccatcctctagccaaaaattagactcctcctcacatctagctctgtttgctaaaatatatgtgttgagtacatttatcagtactctatttgctacacgtactcacaattttgactacgggggatttttgaataacaatctccctatttctagacataagagcattgatctccctgattatataggccagggtagacaaatccttctctgcatattgcagcatgcgtaccgcttccaagcagtctgattccaccacgatcggttttagagtccattgaatcgccaaagcaattccttccttgtatgctagaagctccatttcccgtgcatcagagcaccttccaaaaaatctgcaggaagaaaagatgacagttcccctctcatctctcaagatcgtgccagtgcctccattctcataattcggatcaaaagagccatctacattaagcttcatccatccaggctgtggtttcctccatttctgaatccaagcctgctgagcacaagcctttttaactgacggccccgggagatagctaaccacatgtttcccttttgccaaattagccattgggtgttgtcggatttctaatagtgaaaagatatagtgatctcttgaaacctcctagatgcctcagttggtggagctggtttcccatgaaggatctcatttcagcagtaccagttctccacaagaccattaagaacatggcatgttcttcttccgggcgtagctctagttgataaaaaaatcttggatgaggctgaacgcctaacaacacaccactctgacaaactcccggtactctacatagcttcccacaaagctttggcaagaggacaccgacacagcgcatgaaagacatcctctgtttccatcccacatacagtatatggatctgaacttgcatatttgtatagtgacatattatatgttgatctatcatatcaaattttcttaacgacatgtaaaaacgagaagttgtctcctcaaaaggtaaataaacttccgcacaatattgcacagcaactagcaagacaatgtacaacaagtcctaatagcaaagcacggctaaagaacatagtaatctagttctagccacaagatgtatgcatagggatttgtattttctttttcaaaaatacaaattggacaggataaagaagaagaaaaaaagtccacacctgcacccttagcgagaagcacgcattacacacgccgaagaatcaaacacgaaaggtataacctacaaatggattatgccattgtggtttagggattcatgaccaaagttaattagctccatgctagctaggtggccacccagccatgtggactacggaataaaatggatcggtgttgtcaaactccggtctccttgatagctaacatgttcatcttgtagcagggagcctacatgattagcagtacgaaggctctagtgctagctctagcatatctacagcttctcacctggttttcagatctgctactccacaatccatatgccgttttagtctacaagaaatttacaccgcaaatcgtcataacctatgagaaacctatgagaagatgttcataggactttgcttttcagaaaacagtacaaacatggaaagaataattaggtataaatacgagtacatatgtcaaatctatgatttgaatactggtggacagattaaaaaaaatatgaccagctgtgcagttagtaatttcataagaaatttgctataacggttttcttcatgatcttaaatgtgtaagaaattgggacttttacgcacaaatcaacctgctgcagcatcgaagttgagcacatacgtgttatctatttttcagtgacttaggctaaaacttccacgtgtccattttggagatttatgtgggcttcaccggaatactagtcaaaactggactataagtgattagatgcatgggctgaaaaatctgataaagttgctgggctacggcgtaggcaactaagctgcgtgaccaaaaactgccatgggcccatggaaaatgttgaaatccaattggcaaccttaaccctgttggtttaggtaataagtccacttggactcccttaactagtggcaaaatctgattcgtatagttgaactgtataataccaggtatctaacccctcaactattaaaatcggtacaatttaactctctaggcggttttgttgatgtggcatctaccggatccattgttttgcttattaggggaataagcgaaatgacatatttccaaacgaaaaataatttgtgaataaaacttttacatacgtgttcttagcgatctaaaagcaaagactgaaaaataaacttcgatgaaaaaaccccaaaatcaactccaaatttaaggttgaaaattcaaattttagttgataagtataagcataagtgaaaagatgaggccctatgtagcagtgttaacctggtctttgtcccacaaatatatatatgtatatatatatatgggacctatttgttattcaccaaaaaatagaatgagcccacatgtcatcctccctttctctccctcctctctctctctctctccccctttctctttctctcccctttctcttcgcctttagccatctatggggtcgggggtctggagtggcgatggcaggagggagggtgggcaggcggcttggcctgcagaagcgtcgccgcctcctcctccgccttcattgccagcaccacccctaatccgctgagagctagcttattatcgtccgcctcgctatccaaggctgtcgcgtggggaggggggaggtagcaccgccgagcttgtgggcgtgctggcgcagggcagagagatggggaggaaggacaaagaggataacatgtgagccccacatgacaggggtcctatattttttttatgacaaataagtcccacttatatgtttttagttcttataccacataagtgccacgccaataccacatgggcaaagatcaagtcaacaccgtcgtgtgccacgtcaacaaaaacatccttcaaaaccgttgaggaagtcaaattgtaccggttttaataggtggggtcgagatatccagtattacggtttaagagtacgaatcaaattcggctactagttaagggagtcacagtggacttattccttggtttagacctggaagtacagtagtacacgtggttgagtataaagtaatggcccagcccacaaaattttgttagaaaacaatatatactgactcgatcatcgatcacgttgcctttttcttctaactcttatttccagccattccttttttactctgtcgatgtaatactctcttcatttcatattataaaacactatttttttaatcaaccttctttaaattttaccaaatatataaaaaagcaaacatgtacaacaccaaattaataatgtttattttgtattaaaaatattgctatggtttttttaaaaacttggtaaaccttaaagaagtttgactcataaaaggttaaaatgtaaaacggagggagtagtaactttgaataagtattttgtttggcaagtatttaagaattgcaaggtcacatgtttgatttaaccaattcagacactacagatgcagattaagagcaacagagttggaaaaatctcatgacaggacttgaagataaatatgttcgcccagtaattcttgtagtgtacaaatttttacccttttaggttgactatttaattacatcaccccctttttttaagcagaattaacatttgatgaacttttgttaggaaaacattttgtggcctgagggaaacatcaggcattcagttggtattttttttctacaggtatttagggatttgtcccaacacatatggcaaaggccagggatataaatcatctccattatatataaaatttgttattgttcagaacatttcatctatacagaaagtccatctaaggatattgaaggcatatacaacacatgaacacatgcaaacatgttatataccttactaatttttgaatattacacagaagaattacacaggagaccccagtcatcagcagacattggattgatcatgcaaatggacactgcaatatgcatccacagaggttaaagtttcagtcacctatgaaacagttttttgccttaacctccgaagccaaccaataccaaagttgtggatggaagtgcctggagctgaggggttcaggtcatagaatctttcttagacaatgtgcagttgttcaagcagggcaacaactgcaggtattacagactcatcactagctgctcaagaaaaaaaaaagaaagattctaaagaagtgattagagattctgaattttctggtagccatgtttgcggttgaaggggattgacagctatactagttgcacgcctctgcgttcatcagttttatccacagcatcagcatcatcatcatcatcaatcagcacagcgcgaccgcgctatcagatgatgcctgcagcatcatgtacatgctagtttgatcagacagttcctgcgcagacggcaccggctcgatcatcgacaaccgctccagcagagcggtgagcgcctcgcgcatccattcgtaccggcagagctggtaggcttcaccgggggagacctgttcattgatcatcaatagtgagtgacagtagcaggtaagtctctgaattctgagattcagagcttccattgacacttgaaaatggtgaaaacttgcaattcattgtgtggtgggacaatggctcacccatcgacggccatgggtcgcctgctccggccacgactcgagctcctcagtgacctccatggcgaagatgtagcccttgcaagctccccttgggctgctgctgttctggctgctcttgctcttgaacacccagtgtcccaaggtagtcctctggtacatgcacacaagaaatggcaaagcagcaccaaatgtcaatgaaccgaaaaatttcgcatatctgccggattcaaaggagacactgaattgttctaacttctgtcacaatttcgcagttgcatgttgcatttgcatttccactgcaatttcagcaactgttcctatcagcattgcaagttgccttagaattgaatggtttgaaatgatgaaccaagcgaacaagagtcttgtcctatacatggtactaacagcaacatgctgacatgaatgcatcacctacgtaggagtactactaatcaggctggtgatggcagtgtgggggagcaagtaggaaacacaccacatgcatagttgttggggacatggttgcaattcacactagataaaaataaaatatcagcctattgactccgatctgaaggagaaaaactagttttctgatgtcgaacaggccggtcgacgaagtatggaagaaataggggggaaacaataattcatctggcttaattataccgagatcttctcccccaactagaaaatcacaatgatttcagagtatcaccttataaaatggtgggtaatgatatgtttatccccaacccaattgtgctctgcagtactgattaggttggttagtcaaaaaccatttcgttgctgcttttttttttctatcttgtgtgagtctcaaaccaccaactgattgctagtacagtgctagagtgcagttctagccaatgccaatgcctatagagaaacttccatgtcgctttcaccattgaggccttcctctacattcctacatgtttacttagagccatctgaccatagttgcaaacccatcagcctagtttaaccattgctgagctttcagtgacagggcaactggacaaatggctccaaatatcggctgctaaattactcccactatcaagatttgcgccgcaacacgacaccgaaaaaggcgtcgcgccgtgatcccgaacagcagacttttcaggacgcaggcagcattttctctggacgctaatcagcattcaccaccaacagtccaacaccagtgatccacacgtcatcatcgtttgttgttgttaagcatgcgggggaatcaatatagtatgaaatctactggcaaagcaaagaacagtgaagtgttaagcgagagaggaaatggtgaagctgctagttacattgacgatgcccttgacgccggcctcctccatggcctcgcgggacgccgcctcgtacacctcctcgtcgtcctcccatccaccctgtaaacaagagtagagccagatcgatcaatcatttcgcttcaagaaactctgaaccattctggtttcaggaaatcaactctgaaccatttcgtttcaagaaactctgaaccatttggtctcaagaaagtctgaaccatttcggtttcaggaaaattaactctgaacaatttggtttcaggaaattgggtcggaaccattccgattgaagaaatcagcaccgagcaaatttcatttcgaagagagatggtggtgcagttggtaccttggggaagaccatgtcggcgcggttgggggtggagaccatgagcacctccacctggcccggaacgtcgccgaggatgcgagggttggcctcgtctttcttcacccggtacggcacgcagctgcaatacgaacggaacaaaagatcgcaaggaaagaattgatcagcaaaaagattagcaagaaatcgatcaagaacgcagcggggggatggatcgatggatatgcagcaagacgacccaccctgcgacgaggcggtactcgttgtcgtagcgctgcctgaggcggcccgtcctggccaccaccttgtccggcgacgacattgcaatctgccgatcctaacgcacgtgagcagatcaccaacatatacaagaagaagcaaacagaaagtaggggaaatcttggtcaccttataaaggaagcagaagaagggtcaagaagacgaacagaaaatgcctcctctgcctctggatgaggagaggtgatgatgggattggtgatggcggcaatgatgccacggccttatctctccaagggggggaagaaaattgaagacgataaaatagcaacggaagcggaggcaatctctcacaattcacagaaccgagagacgcgcacgcgcctataatggcgcgaggcctcttggttcccgccagatttatgggcgacgacgcgcgagtaggagagagaaagagagagagagagagagagaagaggggtcaaccaacgtgacccgcctggcagtctgccattgctgccactgccaccaccgacccgcccaaagaaagctacggcagacagatttcgcgccatttctatttatgttcctcgatggctaaaatacgctaatttaagctgtcagggaagcaacgagggaaaaatgcagagattgcagcaggggtgatcacgttctcgtgtgttagcgagacaatgtggtgtcaactgttaaaattataataccttcgtctcaaaataaactaagttagctaacgatgtgataaaatccagtacaacgaatttagacaaatgtttatctagatttattatattaggttgtgtcatatcctaatttattttaggattaagggagtgtactttcaggacaagctgaaaaatatattcccttcgtttgatttattttaggataaaggaaatatacttgtagaagaagctgaaaattatattttgttcattcggagatagatgtgggtaagaaattggctaatggcccgtggcatccctacttctaaagatttagccatatctatttaggtttattatttaggtttatgatttggtcaaatttttaaaatttgactttgattttatcttaaatagatatatatttttctaaaaaaatgatatttgttagttagtgtacacggtatgtccatgcaaaaatataactatatatgtatatatgattccacgagagtttaacttagtgctatgattaaatcaatgtgtacgctaaattttattgtgccatatagtattatatctgttgacttctaaaatgccatattgttatacggagtatactctatgcggtttcataattttttatattatgaatgatgttgcggtcttcaaaatatatcttcgactatatttttcattacatattgaaaaaagtaagtaaacatttaattatgttcaattagttttaagaagatatatctatcgttttctagtgtttttaaactaaatattaacttgttgatagtctaggttttaattgttttatcttaacctatctgaaacgtcaagagctatggaatgcatcatcaaagatgtgtcaccatcaccgaacaacaagtactatcatttccccgaaaaaaaaaacaagtgctatcattcaggggttgctatgcaaatcaaacctacatattattgtaaactctttatgaataacattgagaagcttcgtgagatcacgaacatgcatgctagtaccacaattgtcaagttaaaaatagtgatcatgtacttggattcttaggttgctactcaatacaattaatcaattatcaagaatctcatctgctactcagtagagggaatcttttcatgattaaaaggcggtgatatatggagtaattaactaggttcctagttgaaagtacgtatattcttttaaaagtttgagcaatccctattggttttaggatgatctaaacttttgagaaattcaataacacaacaaatataaggactatacagataaactatgccaagtcataaaagtttctcagtctgcctacttctgtgcatccatctattgccgtatatgatcttacagcccatataatttatacgtaaatagtggaaacaaggaataaataattatattgtagtcagcattgtaatgccctggctagttaattagcaacctataatgatatgtctgagacccatgtgatctaaataagcgtacgtgatgagggtttaacttataatatcctttctacttcaagatgctatgtatactccctcttttttttcatgatatgttttaagtcagcacaaggattaggagactattaaacgggttaaaagtaccatgctatttatatttaagtacattgggaataaaaatagcagttagtgaggcgcgttttatactagagagtatgaaataagaagaaacaaacaagaaaaacaagcaacaagttaacacacatgcatggcttatattttgaaacaaaatgagaaaaactatatgccttacaaaatgaaacgaagagagtataaagacaccaacacagcctattcaattcaagtaacaattcacattttagcaatatataaaataaatatcggatatatacattcattgattgctttaggtgcaaccgcttgagttgtgtgttatgggttgcagggttggttatgtgtccatttgtttgagttaaccaatttttttatgtgtgtaaacaacatctagcactagataattcgctagctaggtattatttgctttattttattttgataacacaagcatgttaatatatgttagtaccaaatatatgaacgtatcatagatcgtgggttggtagtacactaataagtaataacttcataattttgttcaaatgttagttagaatgagatctcaagccttgcattgagtcaaaccattttgtaacatagtacccacatctaaataactaaatgtatcattgatactccctcgtcccattttaaatgcagccatgagtttccgtgttcaactttaatcttttttcttatttaatttttttttaaaaaattaaaaacataagtcctgcataaagtactttatcatctaataacaataaaaaataggacgaagggaaacttatggttgtgcttaaaataggacgaagggagtgccaatgtaccatatatagctgcagagagcagaaatttattctctgacaaacttcccattttcacatggctataaatgcattttaatcagctcgtcacatgcatgcccattgaatctccatcttgatcctgaccatatatactagtgtaattaaattattctcaacatgttaattaactgtttctttctagtactgttgaattgatgtttcccatttgatttatctattgtactaattaattaatgttcaaattgaggatgatgcattctgtttggagctctacaattcctggggtattctcattgaccagggatgatgagatctactctgctgaatcaataaccctgttccatttttctttgccaaaagaaagttgaacataggtggttttacaaaacatggcgatgataaacgaagactacatctataaccatgaagaagattaacgcaaaaaaggaggcacacattttatggtgtcggtcatgaatatcaaattactccctatttatccttgaaagcttactaaatccctctcgtatccctgaaatttacccaatctcttctttaccctctcatgcccctgaaatttaagaaattaaattaatcttcctatatgatctaatttaatttcagaactttttcgaaagagcagccacatgtatgcgtattacaagcatactgacatgctttcatatttcagttatatgtgttggtgtatatgagcacgatatctctaggtttggtagtttagcttttgtatcaggctctgccttatttgttatatggtctattacctctaaatataataaattaagctcttatcctccaagccatgtacaaatttaatcggtctctccatatatatgaaatcaataaatttgtacaccaaatatctccaaaatagatcatcactcaaagaactgttcccttgtcccaattgcatcatccttgtgctctaaccttttttatatttggcctttcaactgtactgaattttacaatagatttgaaagcgatgttggggccttaggggagaaacaatattcaatatggtgttaatattgttatggcctttgatatatatagcgacatgcttatgccatatgggctgcggtactgtgtttttattgaaacttttctttcctaaacacgtggagctatgctcagcagttgcgtcagtgcttctcttaatttatcgatgaaagtatagtcatatatagtgagtaggttatgatttttctctattagaaaattgtttcagagatttaccctcttactcttgtctttgtctatcccaccaaaccctactaccagataaaagggaccttcaactcttcaaacaaagaaattaacttaattatccctataaggctataattaacccaatcaatagtggtactagttcctcgtaatatgttgtagagtttgtactcccaccatgtaaaagtctctactgttataaaaattatatatatttttgccggtattttggtaagtcatcgtgtttgagttggtttttaagtcatttttgaaaatataaatccgtatttgagtcagtttttaagttcgttcacttttaaaaaatacagaatgagttgtataagaaatctctttaaacaaactcacaggctaacttaagacaatcgaactcctaattacaacttatgattttgtaagaaaaatatctaagcgaatttccatagggaatttgaccttagctaaacagtacaacaataataagattaaaatagccttcacctgttgcaatgcacgggcattgtgtgtgtgtgtatatatatatatatttgatatttaaattttataaaaatcataacttttaagtactaatttttcctccaaaaacctctcattcaaatttcttttcatcttacccctaatcacgttattcaataaggtactctatatgtttcagtttattaaagttctagcaaattttacactaaactaaggggtgtggcaaattgctaccctcattattaattgtatcctaatctccttcggtttcagtttatttaaagttctagcaaattttacactaaattaagaggtgtattaataaattgctacgaccctcattaattgtattataatcattttttttctaagcaagcatcaaaattccttgtaaggagtataggaagaaaaaagacatctctaaaaatattttggaatatgaagacgacaagtattttggcaaaattttgacttctagaacaacatgtaaactgaaactgagggaatagctcatttctcttccatactagtttattgaatgccataattttttttttggactgagggaccagtggtttggtcatacggggttcaatcgatattggataaaaactaagcgtatatgagagggttaaaccggaaaataatccgactacgagacatgacatatgcatgtttacatacgcaattcaatttttatagctaagatgtattttgagatgggtctacttacgcaattcaaaggctggatctcagagattagtttttaggttaaattcaccggtagaaaaaccatctttgctcggtcgtccaaaatccacaatagtcccggttcgaataggaaccgggactaaagattatttttagtcccggttaaaaaatttttgatcaccaaccggggctaacgatcatttttagtcccggttcaaaaagttatcggaccgagttagaccccaattcttttttagtcccggttggtataaacaaccgggacggacaaaaaaaaaatcaaccgagctggcgccactgccacgcccggccacctcggtctctccccctttttttccctctcctcacattaatcccttctccatccttatccatccctcctccatccttatccatccctcctccatcccttctcctctcccattcctctcccttctcttctcttcctcctcctcctcctaccacgtgaggccgggcggcgcgcggcggtagggagggcgtggagcggcgggcggccgagcaggcggccagcgaggcggcggtgctccccgggcgggcggtggagcccgaggcggcggcgctccccgggcgggcggcggagcccgaggcggcagcgggcgggcaccggccgccgaggcggcgggcggcgacgctccccaggcggcgacggagcccgaggcggccgagctggaggccggcgaggcggcggatggccggcacccgatctctgcgatgtggttttttcctgatctgtgcgatgtgtgcggccgatctgtgcgatgtggatttctttttctgatctgtgcagccaatctgtgtgatgtgatttctttttctgatctgtgtgatgtgtgatgtgtgaatgaatttgtggggatgattttgtaattttgtgaatgatttgtgatgtaggctatgtttagttcagcgtaaagtttggattttggttgaagttggagatgatgtgactaaaaatttgtgtgtgtatgacaggttgatgtgatggaaaaggactgaagtttggatccaaactttggatctaaacacaaccgtatttggagatagaaaatgcagcttgatgtatttggggattttgtgaatgatatgtggtgttagaatgatttgtggataatatgaatgatttgtagggctcgaaatcatgcaagcagcagtaaaagaaaaagaaaaaaaagaacattagtcccggttggtaactctaaccgggattagatctttagtcccggttagtaactccaaccgggactaaagatccttttttagtcccggttatttcaaccgggctaaaaatgagtatttttagtcccggattcgttagtcccggttacataaccgggactatagggggttgtgaaccgggactaaaaagggtttgttcaccagtaattggatcaacacacaagagttaatcgggtaactatatcgtattatcttgggcataacttgataccatcttttttgtggataccagataccagtgtcgtgatcgagccagcttggctcattttgaaaggactcacctttaatctttctataccttctatcatcgttcgctagcaataattatatatcaaaatttatacaaccatgcaatatcatttacaatatatttaattctacaaattaacacaaattaacatgaaagcatttccaatcatgatccctcacattatttttataatatttaaacatatatattcatcatgcattgaagtgcgggatactagtatcatttactctctccatcccaaaatataaaggatttgagagagtccaaattcgtagtgctagaatattcacattccttcaaatcgatgaagagagtagtttgtttcatgattagtaatttagtattacataacttgattaatatttcatttacaatctcccacagagtctactaaatctatttctttctaaacattgtttggaaaaaccaattttagttgtcactaataacgaatatcctttttacgtactcctagtatgattgttgaaaaaaaaccatatcaaagattacttaacaattctcctagcaaagcatgaagaatcaactactattcttcccgtctctaaatatttaaccccattgacttttttaaacatgtttgactattcgtcttattaaaaaaatttaagtaattattaattttttcctatcatttgattcattgttaaatatacttatatatatatatagttttatatatttcacaaaagtttttaaataagacgaacggtcaaacatgtttaaaaaaatcaacggcaccaaatattaaaggacggagggagtagttctgatctgatcaattgagtactcaattgtgatcttatgtacgcatgacaatttttcgctaaatttcagtcacacttattatatttcaaatttcgaaattttacttggaatatgcataaattacgtcccgcatcaaaacctcaaaattaatttcgtgacatttcaatcggttttcgagctatatatgtagaaatatttggagttaatatgcctccgatccggccggccggccggccatctgcacgtagaacgcacgcacgcgtgccgacatgccgcaaatcggccgcgtcagctacgttactccctagctagctagccgtcaaaaaatggaaacaatccgtgcttgcccaacgatacatcatatggtccatccggccgaaccgacgaccacgacgaggtcagtttcgacctgctgcatgccaaagtcgatcgtctacaaatcaaatgtaatggcaattaataggagtagtaattaagctatatatagcttacattgtgtaattagctgctaggaattaatcgcataccggtggcttacaggctggctggctcaaagctatgcatacaatatttatgtactcccttcgtaaaaaaaataccaatcctaactttaaatatgaatatacactatatccaaatttaaatttaaaattagatttagcattaggcttttcttaatagcagagtgagtagtcgtaaaagaaattgttttggacagtgacagtctaaaaaaacacaactttgacttcttatttctaataaaatattattgaaaagtgatatatgtatatttttatgaaagtatttttgaagacaaatctatttatataatttttatatttttaaactcaacaacttgagagttattcataatttaaattctcaagatttgacttaaatattgttctcaacgattttctttatgagtacggaggaattaagtaggaagtcggttgcgagatggaagcgtcgtcgtggcggctgactgggtcaggtctctagtctgcaggcaaggtcaggtgcttttgcttgtcggcaactcggcatcgatcgttactttcttgtctactcctactcattattattaattaatgggggtagtaggtcaatttaagtaggcacacgcacgcgtccaaactcgacccccaagctgcatctgcatgccgaccgcgaggagttgttataagccatacacggagtatgtaattaacccctcggacacgcccccgcgttccacagcgatcgccgacgtcgatcgagatcatgggcgcgttgctatatcatgttcgatggaaaaaaaaacagaaacaaaacctcgcaaatttcaaaccttaatttatatccacttaacgattcgtgcttaatttaggatgtcttcggaacctgttcccaacactaggtgcctgcacggaaaatggaggagcgattagcgggtaattaattaagtatttgctatttattttaaaaaatggattcatttaattttttatgcaactttcttatagaaactttttgcaaaaaaatgcaccgcttagcagtttgaaaagcgtgcgcgtaaaaaacgagagtgatgggtagggaagaggggctgccgaacacagtctttgcaactgcgtgcaagcccctgtgacctccatcgccatggcgccgcgcagattcatgttcctccatcgattcgaatacctcattcacttcaacaaccaaacacagtctgaccggttgatgttctcctggatcgatcatcagtcaatccacaccgttgatctcattcacttcatccgctatgcctaccaagggcatttatatttgcacatcatcttattgaagctagcaagcctgcaaccaattcctgctcagtactatcgatcctccatccctatctccctgcagtcgtaccgctagcggcgccgccgccgaccaacaaggcaaaggacgacggagcctcgatctccacgtctatatgtttatgattcgtaagtctgcgatgcgcctgctcaatctgtttggtagtattttctcgtgttgtgtctttggttcatgtttgcccagcaaattcctgattaatatgtatgcttgtgtcctgtacgctttcactcgcactgcagactaacgaatattggctatagccgactgggggtgcctgacgagatatggccgttgcactgccatcacacattcacaccagcttcgacatgaacaaagctgcagagtattgaaagctgattctgtgattcgtttaatttgtactactaatttattatatgagctaggcaaaatcacatagcatttacatacatggttttttttattcgtttacgtgctatttgccattttgtaattaaatctgttaagcgaagaaccacttacatggacaacactcaatctcacatgttttagcactaattataaattattcgtacataattttaccacatatacatggtttaattagtacataatataaggttttttgcttgcctgctttgaaattgttatccaaacgagcaagtagtttccatcttgcaagatatcagaattatattggcaatttaacgtacaaatgtctcggctagattgcatatatgaactcatctattgagcaatagtttttatttagtcaagaaagcttatttttcttacaaagtcttgccgcaacgcgtggggtatccactagttatataatgtttctaatcccatgaaaactttagaatccctgaacaaagttggttatttgttgttagagtctactggcttacgtctctttgacaacatatatattagagggtccactcgaggatatatgtacatgcgctttttgtgtaatcacaaaaatgaaaagaacattattatggctcgaatgtcattagatggtcaaatgtttcattggatgctcgcatacaacatttacaaaatagaggtggatcattactttaaaaaacagtaagataccgacatatatacatgtttaattagatgtttgatacaacaatataatctacatgtataaggtgtgaaacatcacttaaaataattattacaatatttcataaagattgtgccatgtccaaaaatcagtgcaacatttctagaaacaactggtataccattcgaatgaaaagagtgaaacacttgaatgcaaaattacaacaaataaaagaaagaccacaacaagttgtaaagagtatgcagaaggagcctatcagtctaaatgtacatatatacttgctcccttttatcggtcggatctagtctctatcaatgttaccaaagtggaccaatgttgagctttgttaggatccaacaagtggtacctctaggtaatagtaccactaggtaccaaataaaatccagccgttgaattagcagggtacgattggaaacgaaccgaagcggggcggagagaagacccgcgacgcgagcagttgcgtatagatgccataatctcctcgtcgtcctcaagcgcccgcgccgacaccatgatctccaagtcctcatccgccgcagtctctgccatcgctggaccgccgcaaaaatctcgatacgatgccggcggcttgcctgctcctgctgggctgcatgcaggctgctcccatccgcgatatcccaaacaaaatgttatgcaagggctcctaagctcctctagaaaaatgttttatccgttgatattagcatttggcttatggagagataatcggcagttaacatcgcataatctcgtacagaggaatcaaattagtgccggggaggagagaggatgctggaaagtagtcgagcagtcgtcccaacatatcagcccacgtcctccgatgtcgccgccgcgtcaccgtggccgcctcttcgtcatcgtgctcgtagccagcctgcccacgagctcaaggagatcttcccgttcccgtcgccgccctgagctatatctggcgccccgaagtcggcggcgaccggatctggcccggaagccggaaggggggagttgagttgggatggggtagggtggtgacggcaggttgcggcgagggaggcggaggtgtccaccgatctggccggcgagattggtcgcgccgccgccatggaggacgtgctggagggggatcgggaggagcggcgttgggaaggagcctgcggtacaggagtcagggaatacggaccatgcgaaatcctaattttgcccttccgcttcttcaatgcatgcggatgggatttctgtacctggcggtaccgaggatcgatagccgttggatttacctatatggatggttcagattacaggtaccgggaggtaccaaaagtttggatggacggtaaaaaaactctagaaggagaaaaggaaaaaaaatagagaagctttgaagggctcggtagtctaatgtacacatgcacttcctatatagtgtgtaattgatttggattttaaatcagaatgaaagaggaaaaatgcaagtaaaaaagaactgttggatatcttagatgaccgattggatccaaatgccaaatgccatagagagacagaaaacaaaacatggacaccacatacgtgaaaaccacaaacaagcataagggtaaattcgacaaacttgcttcaagagttgagaagcaagttttatacgtccggttttgaattttggagaccaaagttaaaacatttgaaatgttgaaggaaaataaatacttcttttagcacaaaaatgattagctatatcacacctatatcttatataccacattcaaggtaaaaaatcaagcatatgattgggccacgtggctccctaagattttagggtttgctcctttgaaaatcagccacatgtcccgtgagattcagctagagcgtcgatcgtgcaatgtctcatctcttctattaatctaaagctaacggctagccattcttctagcgtttcattggtccacatggcatgtttcattcgtccagccctctcgattagtccagacactggaccgtgaaaaagaaaaagaaaaataaaagaaaagccattgattcattcactgtctgtcatgggctgtacagcccagtcacgcactcatgcatgactgcactaggcctggtcatctagcgttgttgctacagtatttgcatgttgcactttaccttctcgggctaattaattagtaataacacaaacaggaccaaacagaaataggaaaaaggaaggtagaaaaaagtataaataattttgtaaaaaaaatcttcaaaacataaaatattgatatcatgtatttatataaaataaataataatcgggaaaaactaaatatcaaatataaagtgaaagagattggatgagaatttgtaatactaagaaccgttttttcaaatatgcactttatcattgatactatatgtacgattttttggttaatgaaatcacaacaattttgaggaaacataactttaaattttctaatagagtctctagctatttgccaaattattgatcatcattaattacaatcttactttggtttttctcataattctaagacaaacataaaattaaattccattaatatgtccatttgaaagaattttttcagagttaaacttactcatgaaacaatatattactctgcatgtttaatattacttgtcattctcacatttcaaattattatttttacatcgtggtcttctatcttcaccttttaaatgccatgtataactattaatcagttaatattgcttttgaaaacgattataatgtagttaataagcatatagcagtgtaatttgccacatctccttgtttgatgtgaaattttgctagagttacaaataatataaaatgagaggtagtcaaatatattacagatgagccatattacaggctaaattaggtggcacgccaacaggcgtgcagatcttctagtataattctattctacgattcacgaaagacaatcttataataactttccctgattaacatgcaagcaacttcaattttgttgttcgtacgattcaactagggatgtcattctctattttttttataggaataagttcactttaggttccttaatttatcgttcagtctgattttcatcattcaacaaaaataccaaatacaatctgtgtcccaacttacaaaaccaatgcaaacgaggtccctcgatagtattgtcctcggttttaactgacgtgacgtccatgtgactcctttgactaaggtcttcatctcacgtagcattgacgtggtacttatgtgacagtttgatccaaaataaatagaaggagcaaaattaaaaactaaaaaaattaaaacaaatatgtggggccccatgttagccaaacaagaagataaaaaatagcgggaccaacatatcatggctcccactttctccacctcacccctttacccctttatctctgtcacctctctccaccggtgagcgcgcatagaaagagacgaggctaggagggagggggtaggaatggaggagatgaggaggacgagagggactgagaggccggcgagtctcctctctctccaccacccttgccgcttggtgcaacagtagccgagggggcgaagatctaggagggaaaggagagcgaccgctactctcccccatccgccacgtgcccatcacctatcttgccgcgtgctgacttggaaagatggggaagatagagctgaaataggttgggaggagaaggaaaaagtacatcgaaggtccctcaacttgtcatcaaattacaaaatcgtccttaaaccacaaaaccggatacaacgtgtcccccaacttacaaaaccagggtagaataggtccctcggcagttttgactccagttttatccgacgtggcagctgactcagcgtgggacccatgtgggtcccacgtgtcagccccttcttcccctcccctctcttcctctctcctcttcttttctctctccctttgctccagttcggcaggcgggagtccgacggccggcgacgggcgatgaggcggcggcggcggctgcgacgagcgacgaggccgcccgctccgcctccacatcgcctccgcctactcggagcgggaggcggccgcggccgacgacgacctcgccgtgggacgcgctcatcgcctacgcccgcgccctctccctcatcgagcccccagatccgacgacgacgacaaccgccgcgttcaactcctcgcccccccacccccgccgccgcccagctcctccccggcggctgccggccgcgcccatctccggttcgattgatcgaccatgcctcccctcgtggcgccggtggagcacaaggacgggccctgcaggcagcggcacgcggcggtggcggcgatgacagcggcaacggtggctaagccgcagcagtggtcggcgtcgttccacggcgcggcgcggcggagcagcggtcgctgacgcagcctgacttgctcgccgagcatgtggccgctgcacgtgatggcgcgcttcgagtgtcgcgtggctgacctggtcgccgccgccgtggagctctacctccgggaggggcgccggctgctgctgctgtccgccgaccccgccgccttcggactctgcttcttcctctccccaaaggccgcaacgattgccgcaatcaccgccgccgccgctcctcccccaccagtttagggatgagagaggaagagaggaagagagaggaggagaagaaggggctgacatgtgggacccacgtgggtcccacgctgagtcagctgccacgttggacaaaaccggagtcaaaaccgccgagggacctagtctacattggttttgtaagttgggggacgcgttgtatccggttttgtgttttaaggatgattttgtaattcgatgacaagttgagggaccttcggtgtactttttccgaaggagaatgttccgccccattataagcccactgttgaatgtagtctatacatgtacaaattgtgagctaggatgacgttttactttttcctgggagcaaaaaggagggggaaatcataagaactaagaagcactaggtgaaaccccgcgcattactgcgggaatttagtatgataacaataaaaaaataacgtttaagatagctagataacatcagattaagtaaattaatgtggtttatgataatttaaatttaaatagtatgtagaatggtgattcaaacgtaaaaagtaaggtggtatgactttatggaagaagaaaagtaggaagatagtttggaccgtagattaatcatctaaaggctaaatacaattgatgtgatatgacttaattagaggaaaaaatgataatttggaccatagattaatcatttaagcactaattgaggatgaactatatataagtatataggatatcataaaacataaaacataataaagatatacattgaaacattatgtgaattatgttggatgataatttaacatgtttgtatttcaaaagctcttaaattataaaaactataaagatataacatgtttgcatgatgtttaaatgtgatgattgttagtggatgatgatgtgtcatcttgttaattagtggataatgatgtgtcatcttgttagtggatgatgatatgtcatctttgcatgttaagcttaaggagttaattagaggaaaaaaagagaaagataatttggaccatagattaatcatttaagcactaattaagtgaggatgaactatttaagtatgtatgatattataaaacatagtaaagatatacattgaaatattatgtgaattatgtgggatgataatttaacatacttgtattttaaaaactcttaaattataaaaactataaaatcatagataatataacatgtttacatgatgtttaaatgtgatgattattagtggatgatgatgtggcatcttgttagtggatgatgatgtggcatctttgcatgttaagcttaaggagttagtggggataactgtaaggattagttaatcagtattcatcagtaaccactatacatttttctttactaattactcctttaaataaaattttaaaaattaaataaaattctgtaaatacaaaacatattgttttaaataaaattttaaaaataaaaaaaattatttaaatacaaaacatattgttaattactcctttaaataaaattttaaaaataaaataatgttctttaaatacaaaaacatattgttgagagtgggatttgaacccacgccctttcggaccagaaccttaatctggcgccttagaccaactcggccatctcaacttcttggtcaaccagttattatattctaattgaaacagtttgtattacagatcacacatcttccgtgtaccaaattcgctaatcacccggatcgcgtgtgcccgtgcgcggaaaagcaacaccagcatgcacacacacacaccaaaaacgcaaatccaagcatcgcacgctacatcagcaacaacggcactatataaacccatcttaacgacacctgattagcagctccagtacactaattaacccaaactccctccacacacattaaccactgcacaaacgcagccagcgacagcgaggatggccggccgagccagctgcgtactcatcctcctcctcgccattgccggcttcgccgacgtcctcgccgccggcggcgcgacgccatcgtcgtcgtcgtcgcaggtgagcacgacgacggcagcggagttgaaggaggtgaacgggatgcttgcgtgcatgatcgggtgcttcacgcagatgttcgggtgcgccttcgggtgcatggcgaagggccccgacacgacgctctgcgtcgtcagctgcaaccagaacagcatcgtctgcatggtgcgttgcgccctcacgccgccgccgcccaagcccaagcccacgccgccgccgcccgcgcccacgcccaagcctcccgcgccctcgccgtcgccgccgccgcccaaagccgccggccacggcgtcgctggcgaccccttggcctagacatgtacagctcagctcactctactatacccctacaagtgctagctcctgatacgacattataaatgtgcctagctacgtgatatataatcaagaatcaagaaaatacaaactgataaaagaaaaaaaaatcaagaaatacgtatctatgtagatctcatagttttcatatatgcatttatgtggctgaacatgtgtttgtgccagccatatgtaacaaatgaaaatgggtcgtcagtcatactgagtgtatgtatttagtatgacctgagaaatgtactcaattgtgtaatgttccataattatgttctggaaatgaaaattttagattatatttttgtctgtgcaagcatctgctcttgcctaatagcacttccttaattaccacaggttagtatggtccttcctacatgccaaaatcacaccaacaacggctgcaaaatgtgtgtattcatcaagtcactttgctgactgtcagatgggtttctaagaattaacaagcaaattgtagtataaaatgtgagacttgagcaatgtgttaagatacggaagtgtaacttaatttacagtaaactgttaatacaacttacagcctgtagttcacctgcaagagttgcatctctccctttactccactttgagacagtatgtacaccttttttttttagtacataatcaatctttagtcctgcaacacagagtaataacataatggcaagccaacattacatctgcactaatctattatattattaaaacagccttgaaaggaggcaccatgttcgctgttgagactagaaattctcacattaatcggagaaaaagagaaaaaagctacacctttagattatacagtgcatatagattaaagggtgtagatttattgggcaatatttctattggtatgaaacaaactctatttatataataaataaataggaaaggttaaagtacttctaacgagcatgcatgtcagagtcctaatagtatttaggcaaggtatgtccgattgggtgtggaaaaaaaaggaaaaaaaaacacaatccacggaaggaaaggggaaaaaaagatgcacagtccacggaagagtattttgtagctaccaaaagttcacttgcccagataatcttgatgccactctaaaatcacgtgcattcatccatcttgctatcaacacctacacgatagatcactggaaataattttgtagcctaccaaaagtttttttttctacttaaatacatatttgaggagtctgttcactatattggaactagaaaaaatatgcataattatatttgacgtttaattatgcgtttaattatgagggctttatatttaccccattaatcatatttaaaaaagtttagaccattaatatggttgatttaatttaaataagttataacaaaacatatacagtatataagttaatcgtataaaaaaataaattggcgtcatggatcactttaataaataataattataaacacacgggttcagacaagaaggacaaaaaaaacatccatgtcttcgtaatatttaccactttgtgaaccctttacttgagaaaataaagaacaagttattatgccatatgtcatatgttatactccctctgtttcatattataagttatttgattttttttcttatcaaagtcgttaggtttgaccaagtttatagaaaaatacattaacattttaatacaaaacaaacatattattaaaatatattcaatattaaatttaatggagctactttggtattgtaaatattactaattttttctataaatttggtcaaacctaaagaaatttgactaagaaaaaagtcaaatgacttataatatgaaatggagggagtagcacctaaaacataatttcatagacatccaacgtcacccacctacacgatcacaagcggtccatgagaaggcctggttgcgataattttggtctatggtgggaggcttggggtcgcctatgtaaaagaattatcataggcagcccactacgctggccacctctagaaatacatttattttttaggactacaaataacgggtgtaagtgggtaagccgttaactcacttataagttaaaataagtaggttcataacttattttgacatataagtgggttttgtggcttatctacttacactcttactacaaataaataatagttcatagcaaaatacaatatataaatatccaaaagtaagaataataaaaattttgaataacaaataatataaattctgaaattggttttcaatactaatccaaataaaattgtaacaacccaaaataaatcaggaatatatttagaaattaaaaaatccggaataaaaaaaggaatacgaggaagagtacctctagaacacaaaacgagattaataaaaatctagaataaaacataaaataaattctaaattgggatttgagtacaattagaaaagaattgaagaatgccactaaaatttctatcaaattataataaaccaacaagaaaagactacataccaagaagggtatatagcaaaatacattatgaaaaaaggcaccacgttcgctgtgggggctagaacttcccacattaattggagaaaaagaaaaggagagtccaactagaaatacaatttaaaaacaattgaaattcgaaattaaaaataagcaatattgaaaaaagagtccttataagaacccaatacgagattaattaatattcaaaataaaaataaaataaaattcaaaattagcaaaaataaaaggaaaagaagagttccggtagaaatacaatttaaaaataacttcggaattcccacattaattggagaaaaagaaaaggagagtccaactagaaatacaatttagaaataagtgaaatttagaattaaaaataagcaatagtgaaagaagagtcctcataagaacccaatacgagattaattaatattcataataaaaaataacatatgaaattagtaaaaaggaaaagaagagttcgagtagaaatacaatttaaaaataactaaaattcaaaattcccacattaatcggagaaaaagaaaaggagagtccaactagaaatacaatttaaaagtaactgaaattcagaattaaaaataagcaaaattgaaagaagagtccatataaaaacccaatacgagattattaaaattaggaataaaaaataaaataaaatccgaaattagcaaaaaaacaaaaagaagagttcgaatacaaatactgtcagggttacgggttaggtataccctttacccttcgatatacgtcgcatatcggtatggcatacccacgcgcatacggataccctctgcatatattaaggaaatccttcacggagtttacggacgaaaagagtcctactcggacaagactgggtcgtcaatgtatcgtgtagggtctgatgtctccaagttcgacttggaaaccgcctgacctgtgatataaaagggacccccggggaggacctaaggcatcgaatctcagagccaacacaacccccacagcatacgaagccggagcctgcaggagccaaaccgctagggatctagtcgaaccaactcgactacgatctcgccggatccctcgagttccaccgttccctttgtaatctgtgtttttccatcatataatcccgcatcaactggattagggctattacctatcaaggggcctgaaccagtataatctttgtcttttgtttgcttgatgtcgtactacgtagatccttataccaacataccccaataccctctatatccggtctacgggtatcacccatcgacagtggcgcgctaggtagggggacttggtgctcaaggttctactactatgtcatccagcttcgtcgacaacaacttcaacaccaacctcaaccagggattccctgcttcaacaatgctggtgtggactcaagtcggagaaatcgtcttcccagtttacaccacaatgctgatctcagccggtccatcaatgaccggaaacgagaatgcagtggctacaaaccaaaacgactccatgtcgaaagatcctcccgctgaggcggagaacggaacatcaatgacatccgagctcgagaaggattccaaggcggccaaaccttgtcactccgacaagaaccacgagccgacaaggataacttctgaagcgacaaggtcctggtgtcctatccacaaaaccaggaaacatactttgcaagcctgctgggttttctcaacgtctgcgccgaaattcgcgcctgcaaagagcgtggaattcagcgtatttctccaactcgtgatgtctattgtcctatccacaagacaaaaaatcacgacctctcaagctgcaaggtttttctcagcgccatgaaggtgtcatctcctaaggtccaatagtcacacatccccatcagggataaagacaaggaacgaggagcgacaccaacttcagatcgatttgttggggtaatcgacatcggtccccatgaaccatcagtattgcacctcctcgaagactatggatcatcgacagcgagcgcgccgcgggaagtattggctatcaacgatgtcggcacgtcagcgcgcaccaatgcagaagcggagaatcaagtggccaccccagcccagcacatcagagccgtcgacgctatactgagggaaaccccctacgatcccgttctgaacgacgatctcgcgcgttggacagaacgactacgggaatcagtgaccaacctcagcaatgcgttcgaagaggccgctgccgcagcgcacccagagcagccaccaactggcgatgccaatggtgaaaaccctgaacggagggaatcgcctcatcgggccacccctccacctcgcggcaccggcgatctccgcgatcacctgaacggccaccaagaggcacgacgcacacgagacaacgagaaccgttcccggcgccatgtctcttcacggcatcatgataaccaagatcgaggagactattcaaacgaagaccgagaccgtgataaccgccacaactgccacgatcacaacgatcgcgaacggcgggcgccaagcgatactggtcgaggacgtcaccataatgacgacgatgatggagaccggcgccgagacaacagcggaagactacaataagattctcgagagccaggccgacatcctcgtaatcgtacgccggaaccaagcgacccatcgtcatcgtcatcatcctcgtcttcctaatcatcagacagacatccacgaaggacacacgatcgccgacaacccaccgcccctagtgctgggtgtagagctttcagtcgttccctgcgtgatgtccgatggcctgagagattccgacccggagcaatagagaagtacgatgggagcaccgacccaaaagagttccttcaagtctactccacagtactctacgccgccggagcagacgacaacgcattagctaattatttgccaactgcgttaaaaggctctgcacgttcatggctgatgcatctcccgccctactcaatctcttcgtgggcagacctgcggcaacagttcgtcgccaacttccaaggaacctacaagcgccacgcgatcgaagacgacctacacgcgttgacacagaactcgggtgaatccttgagggaatatgtttggcgcttcaacgagtgcagaaatacaatctccgaaatcaccgacgcttctgtaattcacgccttcaagtccggtgtcagagattgctatactacccaggagttggcaacaagacgcatcacaactactcagagattgttcaagattgttgagcgatgcgcccacgcagatgatgcgctaagacgcaagaacgataagccgaagaccgggggagagaagaaaccagccacggacacacctgagtcaagcaagaagaaaaatcgcaagaatgggaaaaggaaagctcaagcggaagtcctcgcagcagaatacacgaaccctcccaagcgcccagacccacaaagtagcgacgcaaagaaaacatggtgccccatacacaagacggacaaacattctttggaagattgcctttctttcaaaaagtcgctcgagaagcacattgcatttgaaaaaggcaagtgagtacgcgtggtcgaaaaggatgcggaagtggctccccaggaatcggactcagcatatccagactctgacctccacgtttcacacatcttcggaggttacacaacgtactcctcaaagcgagaatacaagaaagtggaacgcgaagtctattcgacatggcagggggctgcaccgaagatgaagtggtctgaacagaagatagaattctcggaagaagaccaccccaagactgccgtcatcccaggacgatatccgatcgtggtcgaacccactattcggaacggagcagatcacctttgatgtcgctaaattcgatacagcttataatgccatcatcgggagaactgcacttgcgaagtttatggctgcatctcactacgcatatcaagtgctcaagatgccgggaccgaagggaacaatcactattcaagggaacgcaaagctggcggtgcaatgcgacaaacggagcctcgacatggtcgagcaaacccccagcccacccgccacgactgagccacccaagaaagtgagcaagacaaacaagacgctgaaatcggacgacacaatcaagatcgttccactctccagtgccaaccccgacaagaccgtcaagatcggggcgacactaagcgagaaataggaactcgcgctcgtcaccttcctccgcgacaatgctgacgtgttcgcttggcagccgtccgacatgccgggggtccccagggaggtgattgagcacaaactcatggtgagacccgatgccaagccagtaaagcaaagactgcggagatttgcatcagaccgaaaacaagccatacgagaagagctcgacaaacttctcaaagctggcttcatcagagaagtacttcatccagagtggctagccaatccagtcatggtgcggaaggccaacgggaaatggagaatgtgcgtcgacttcactgacctcaacaaggcgtgtcccaaggatcacttctctcttcctcgaatagatcaactgctggactcaacagccggctgtgagctgttgagctttctcgacgcttactctggctaccaccaaatcaacatggcaaaagagaacaaagagaagacagcattcatcacgccattcggggtattttgctatgttaagatgccgttcggactcataaccgtagggaatactttccagggcacggtccagggcgcacttagcgaccagctcggcaacaatgtcgaggcatacgtcgacgacatcgttgtcaagaccaagacaagcgactcattgattgacgatctgcgggaaacgttcgacaacctccgacgatatcgcctcatgctcaatccagagaagtgcacgttcggagtaccgtcgggcaagctgctcggattccttgtctccggcagaggaatagaagcaaatcccgagaagatcaaggcaatcgagaacatgaagtcgcccacaagactcaaggaagtacaaaagctaaccggatacatggcagcactgagcaggttcgtcgctaggatgggaaaacgagggcaacctttcttcgctctactaaagaaacaagacaaatttgtatggacacaggaagccgaagaggcattcgttgtactcaagcgctacctatcaaacccccctgtacttgttactccccaacctaatgaagaattattcctctatattgccgccatgccatattccgtgagcactgtcattgttgtcgagagagagaaagtacaacgaccagtctattacgtcagcgaagctctccacgacgcaaagacaagatatccacatatccaaaagctgctttacgcggtcatcatgacatcaaggaagctacgccactactttcaagcccatagagtcacagttgtctcctccttcccgctcggtgaagttgtgagaaataaagacgttgttggccgtattgcgaaatgggtagtcgagctgagccaatttgatgtccactttgtgccatgaacagccatcaagtcccaggtactcgccgacttcgtagccgattggactatgcctgataacaaatcagacaaccaagtcgacaccgaaacgtggacaatggcgttcgatggtgcactcaacagccaaggagcaggggcaggatttatcttaacgtctcctttcggagatcaattcaagcacgcaatccacctcaacttcagggtgaccaataacacagccgaatacgagggactacttgccgggataagagctgcagccgcccttggggtaaagcgactaatcgtgaaaggggactccgagctagtcgcgaaccaggtgcacaaagattataaatgctctaaccccgagttatccaagtatctcgcagaagtcaggaagctagagaaaaggttcgatgggatcgaggtccaacacgtctaccgcaaggacaacatcgagccagatgacctagcacgacgtgcgtccagacgagaaccgctcgagcccggaatttttctggacatcctgacaaagccatcagtaaaagtggttagcggcgaagttagcccggccgcccccgacattagctcggaggccacaaaggcagaacgtgccgttgccgatatcgagaccacagatgactggcgcatcccactaatcaaattcatcgacagcgaggagttgcccgaggacgataccgaagccgagaaaataacccttaaagcaaaaatctactgtatggtcggcaacgatctatacaagaaagcgccaaacggggtacttctcaaatgcgtctcatctgacgacggcagacacctcctccttgatatacatgaaggcatctgtgggtcacacgccgccggtcggacattggtcgggaaagcttttcgacaatggtttttctggccaaccgcccttaaagatgcatgcgacatggtccaacaatgtgaagcctgtcaattgcacagtaaacacacaaagctacccgagcaagcgctccagactatccctcttacttggccattctcgtgctgggggctagatatacttgggccattcccacgtggacagggcggctacaggttcctattcgtggcgatcgacaaattcactaagtggatcgaagcagtacccacgggggaaatcaaggccgacaacgccatcaaattcatcaaggggatattttgcagatacggacttccgcaccgcatcataaccgacaacggctcccagttcatcagcaccgatttccaggattactgcatcgggcttggagtcaagatatgcttcgcctcggtctctcatcctcaaagcaacggacaagtcgagagggcaaacggcatagtactacaagggatcaaaacccgagtctacgacaggctcatgtcacacgacaaaaaatgggtcgaagaactctcatcagtactatgggctgtacgcaccacaccgacaatgtctaacaaggaaacacccttcttcctcgtgtacggctccgaggccatgctccccagcgagctacgacatcagagtacacgagtatagaagtattccgacgaggatcaggagaagcagcgaaacgtcgatgtgaaactactcgacgaacatcgcgaacgagttgccgtccgagcagccaattaccaacaggccctccgtcgttaccacgagaagcgcatccgagcacgcatactttcgaacggcaactacgtcctccgatgggttcaaagccaagcagggcgaaacaagctctcacccaaatgggaaggaccttacacgatcacacaagtcttacggctaggcgcattcaaaattgcagacggtgatggtcgcgagttggcaaattcttggaacattgaccaattacataaattctatgtatgagtcaatatcatccatatctgtaagacaccttacagcatcaataaagcctattcttaggcgcatattacaatcaaagtgttcctgcccgatgatcccttacccagatgacacctagcgttgaaaccaatccttatgtccctttatgtcgtctcgacaagacctccgaggaacctaagggatattcggctggggacacccagagtcgataaggacttgtcagatcctgtagagacgaaagaccatgtaagacctggtcgtgtaagagttctcgccgtgcgtattaaccaagccgtgtaatcggaaattaacttattcaaccaaggcaggtcaaaggtccaagatccttatcctccgagaaaatttctctgacgacaaggctaggggctagggagaatgtacgactcaaacgaccgactaaagtcgtgaactgagaacacactctgacacacgatatccggagtaagaaagatctgttaagatagatttcttttccatttcacaaaatactccttataatttttacaagtctaaggctatattacacttttccctaagatgtctatcacagggtacaaagactaccaagaaggccaacgccagtccatagattggaagaccttctccgccaatggcgccatcgacttcgccagttggtctatctccgtcggagtcctccgggaacgagcaaaaccttcacggagaaaatcgaggtccaggcgcgggcgatgatctcgtaggcaagccaacacgtgccctccggcatatcggctcgatcgacgacactcctgcttcaaggcctcgtcgatgcgtttgccgacgccatcgagctgagcacaggccccgttcagccacgagatgtatccggctgccgactccttgggatccccacggggtactcggagctctctacaaaccttggccatggatgtgcagcaactcttcaagtacgagttgaaccacacctcacgacctcggagcgtttccacagccttctttttcttcactgcaagcatggttctctcgagttcccgctacttcaaattttgtcttccaatattggatacgacgatcttggccagcaagagcactctcgagatctgcccaatgtgggaacaactaagtcaagctgcacgcctctttcgagaacatagctgatctagtcggaggagcaataagggatgaatggaccactaacctaaggaagtcgtcgccatccccgtccccgtagctaggatctggtctacattgtctggcgacgcatgtggttcaaacgcgagagccgaaatgatcgccggtgactcaggctgcccgcgctgctggacatcctcatcatcaacatctctacaagggacaaaaagtactcaagatcaacatgcaagagtaagctaggataatagctgcacgcacaaaggcggttgaggtccatcaaagttttacacagcatgtctgaggagtacaagagatcctactcttcaaaaagagggagaacagattcccccagatcgccgacttcttccatcacctccttacgcgcatcgctagccgccccctgatccaagatctcgcggagatcgagttcaggatgcgccagcttcacacacgcaaggacgtggcatgtcccggtatagattccgttggacgtctcctccccgatcctggccgcatgcttggaggggatctcctccatcgccgccgccagcttcgcaagagaagatgtcagtgaaaactcatcgggattcgccgggatggtagacttgatgccgcactccccggcgagctggtgcataccagtataggtgacccgcaacgagccacggattttcgacagattgttcccgagctccgacatgcggtgctcgagcccctgccgttgtcgctcgttgccagccaccaactccctcatcttcttgaggtcttcacgagcctccgccaactcgtgtaccagccagttggcgcgctcgttcgccgacgccgccgccgacctcgcctccgcaatctcgcgaccaatgccacgagcaccagcctcgaggaggcgccccatttcgacctggagctcctcccaggtgaggacggcagccggtggaccacgaccagccgcgggatcgctggctgggccgcttggtgttgcctcgcggctcccgggcgcaagcacgacatccgtcgaggccacagcgggagacgcgccggaagtccctccggactcatcttgcgccgccttcacccacgccgccctatgagacagccatggttcagacaacgctcgaacaagatcacggaaacttaagttcatccacttacttctcgccaagtgtcacaagtcgttgtcgtcgtggaggcgggggagacgcgtccgaggcctggaaaacggttgatgcgaagtaaggcgaaattcttctggctgtatgatcagacaacaggatagcttaccgagggggtagatgccttgcgacgatgtccgcttacagaggagaacttcctcccctttgtcggaacattgccaccacttgtggtagcagcagcagcagcagcatcggacgcctccttggcgaccttctccttcagtgacgccaccacctgatggtcagcgagcggcccgatgatgtcagtcagaggaagagcctacgcttaatcaagtcacaaagcgatctcggaagaaaaacgcagaatgcctattgagtacacttacattgatggcagtgtcacgttcggctgcctccttctcacaaaggggaacatggatgttactcgccgttgtcgggccactgatcatcacctggccgacacgacgtcccacggtttcgctgttcagacctgtgaatcgagaaccaaattttgataaatcaggaggaacgtgaacacgatcatgtcaggataaatacaagaaagataccccgaggagaaacccgggtcgcgtcctccggtccagaatagtcaaaagctggatggactcgagcctggagcggctggatccgtctaccaacgaagtcggcagcgacttcatacccagaacaacctcgtactcggagatcgtcgacaatatcgatgaacgactggagagaaggggtcaaggggggctttgcggtccaagacgaaatcttatccggttgttcctctggaacaacgaagacagggtccgaatcttcgatctgaaggtagaaccacctcgttcgccatttgctgtgagaggaagggcactggaaggggatataacgcgacttcaggcaatcccgaagtcggaacccgacgcatccagacaccctgttggactccatccaacacagctcgtagtagaagcgaaagagatcgagaaagggctctaccccaatataggcctcacaaagatgagaaaagatgctaagaaaggcgatagaattgcggttcagtacctcctacttccctctccatggttccacgaccgggaagggcgccgtcttcctgaagcttcttcagcgacgcgctggtggaggatgatttgccaagatccatcaccgatcggagatcgccggagaaagaccatagaagttcaataccaagagaagaaattcggaaggtgtagggagaaaaccgcagagaatgtagtcctcgatcgtaaccatgcgacctaagacgagctagggtttcttgtgggagcggagaagacgaagaacgcttgcaggcgggatgttttcttcacaataggcggacttcaaaatggatccccaaaattcctttaaatagacacactaccgacggtgtgaattccaaggaaaggagagagatgcccgccggaaatttctgggtctgttacgcgcggcagttttttagacttcagtttaaattcaatcgtgaccattgggcttcacatggtgttctcgactacgtcatgtctctacggtcctcacactgggaacgacaacagtctcgacacaagaagtcgcgaatggttacacgagttcatttaagcagaagtcgggggctactgtcagggttacgggttaggtataccctttacccttcgatatacgtcgcatatcggtatggcatacccacgcgcatacggataccctctgcatatattaaggaaatccttcacggagtttacggacgaaaagagtcctactcgaacaagactaggtcgtcaatgtatcgtgtagggtctgatgtctccaagttcgacttggaaaccgcctgacctgtgatataaaagggacccctggggaggacctaaggcatcgaatctcagagccaacacaacccccacagcctacgaagccagagcctgcaggagccaaaccgccagggatctagtcgaaccaactcgactacgatctcgccggatcccttgagttccaccgttccctttgtaatctgtgtttttccatcatataatcccacatcaactggattagggctattacctatcaaggggtctgaaccagtacaatctttgtcttctgtttgcttgatgttgtactacgtagatccttgtaccaacgtaccccaataccctctatatccggtctacgggtatcacccgtcgacaaatacaatttaaaaataactaaaatgcggaattaaaattaagcaatattgaaataagagtacatataagaacccaatataaaattaattaaaatttggaataaaaaataaaataaaatccaaaattagacaaattaaaaagagagttcaagtaggaatacaattttgaaacaactgacattgaaaataaaaaataacacaatgcaatattagttaaaattcaaaacaaaaaatataataaattctgaaattagaaaaagaaaaataagatttcaagtaggaacacaatttataaataactaaatttggtaataaaaaaataaatactactgaaagaaaaggccatttaaaacacatgacgaaattaattaagtaacagggctataatggagtagaatggtggtggttgatgggacatctaaatactattaataaaacacaaaatagaataataatgacaattaaaaggaatgacgacgggcagatagtcaagcaatcggttatggcggtcggcgggacttctagaaagcaaaaaaaaaaatccaatgataatcatatttgatttttaaaatctcaatgacaataaaaatgagaggcaatgggcgagtcatacatgagtacaatggcagagccgccgatggttggtgggacttttagaaagtaaaaaaataaattcaaacaatagttatattcgatttttacaatcttaatggcaataaagagtaagcggcggacgggtcgtagaggagtatagtgcagcgtttgacaggatttgtaaaagttataaaaaatgaaatccaacgagacaataaactctaaaaactataggtccaatttttagaggtaaaagtaaaaaaaaccaataatactcatgtttgattttaaaatctcaatgataataaagaagggaggcatcaagcgagtcgtagagaagtacagtgacaaagtcgctgacgttttgacggaacttctagaaagttaaaaaatgaacctaaatgataattatattcaatttttataatgccaatgacaatcaataggagaggcagtggacggccgtaaaggaatataatggcaacgtttgacagaacttctagaaattataaaaacgaaacccaatgggacattaaactataaaatctataagatccaatttttaaaagtcccaagaagaatgaatagaaatagtgctaggtcgaacaagcaaataaagaaagatatgacagaagtaaggggtacggtgtgacttttaaaaactataaaattagaaacacaaggattataaggtttggtatttcaaagtcttaaaacaacgagataactatttaataaactttaagtaaaatcatattaaaatatatataactttctatgggtgctagccgcgcaattgcgcgggtcacccagctagtttagtgaacacaagaacaaattctgacattcattgctttaattttttttatacaattacaaagctacaaactgttccactcacttccacagagtaggcatttagctcagcgacattggagatatacaactttgataaatatcatctagctatgtgaaactagaaactcctcagtggaaaaggacataacttaaaacttcacaataacatcaaagccgagtttttcatgtgagcttttctatttccaaggtttcagatctgctacaggccccgcagtccagttgagatgcttctcgcctggctttaagtatacactgtctgggtgtgggagcttccgagcaaggccgttgaggatctgatggaatgcatctctaggttgtgctggctgcggaaacaacatggcctgtttcattgatggattggcgagtaatctttgcttccttaggatatcatcaattgggatggatgtgaggattgagtctagccttggaacatcctcctcgtcaacaaaaacaccgatttcgtcccatgggattgcgtcagcaaacggaagcacaatatcatcagctatgatgactggaatgcaaccgaaaactacagcctccaccaatctagggctccatggtgcccatcccaaggggcacaagcagaagactgagcgctgcatatcttcatagtaagtagctgggtgttccgtagaaatgtcgaagaggggattgttcttgaaattctcccacagtgaagctcgggcacctctgtataacaagttcaacagagtcaataaagcaggaccaagtaccacaggagatgtatctttcaaggttctgcaaacattcttaccttgcataatacccaccctcagggtcattcccattgtcatagaacaggcctctgaagtaaacaaagattgaacggggagtatcaggaggaatcaagtgagcttgcattttctgaggaggcgcatatggtggtatagtgatagaaccctccttcaagcacacatggttcttctgtccaaaagtttgaaccaatgtggcacggcggagcaatggaagtatcccacgctcaatagctttctcttcctgtaaagacatataaccattgcatatgcagtttcagaatagatagggactaaaggtaggatctatcctgagctacctatttcttaaaactattgtggaactaaaatcatgactagctacaacagtgacaaggacttggcaggtaagaagacaaataaaccaatatatcattacctgatagtgaaagcatgccccaaaatcatgtggaacaacaaagaaatgatctgctccatcagttctattccagaatggccattttcttgaaagaaactggattgcgctccgcatcatcctaggagacttgaatggcaatggaagtccagcatgagtcaaatcacaagtagtgtaaacaggggcatagaaccaatcagcctgttcagggttgagcgttcgaacagcactagagagcaagaaacgatgcataaatatctcagcagcaaacatgtggttgaggcatcggggatccttggcgactatcctcttgttatacttgcttggcaagtcataaacaaaaaccttcaaccgcccaactggattgtcttctagcacatcaccagcacttcctgcaggtcaatgatcttggttgagtagaagcacatagtactatcttcataaaactgataagcagattccaagaaaaccagtcatgaagttataatataataaggggacatatccagcgaaaaccatcaaataagtgaaaacccatgaaacctaacctaaaagtttcataaattcatgaaaaaaaatacttgagatggatgtaggcatgaaatacattcccaccaaatatcaagttcaaactcaactttatttaggagtaacagaaaagacattttgggtgaatggtaacatgacactattcacctagaatttctcttttttgtttctctcaaatgaagctaagtttggacttgagatttggtatgaatgtatttcatgtctatagctatatctagtatttttttcatgaatttagaaaagttttaggtatggttttcacgggtttccgcttatttgatggttttcattggatattccccatataattaataagtaatatttaaggtggaaataaatgttaacaagaagaaagaatgtaaaactcaatacaagcttaggggaattcattttcaataaatcatgaataattgaacgaaaattctgttgttctctgaaacataaactcagaatgcaccactctcctaaaaaactcaggtagattctcctctcttttatttggcacaattgcatttatggggtaactgtttatcctggaattattgtattaaatagaaacaataattggatccaattccattatcggaaaagttatatgcacaattggattggctccaagcagatcacagtatcttgacaataactaacgttagttggataggactttgtcaatgagacaatgacataacaagtgtaggtctgcaggtagcacaagcatatatgattgtcttaaaactatcaaatgttaactatgtaacaagtaaaagaaacggaagaggaggagaaataggtgctaaatggtaattcaacatttctatatgttcacacaaccctttgctggcgcggagagattacattccttcgataagcacgagaatcagcgatccattgcagtcagtactgaatttacatcaaactagtattggacatccggatttccttttttatagggggaaaaaagcatatcagtgcgaatgtgcgattctaagagcacgggtgttgttgtacaatgcacattatcaggtcgaacttgcaattgcatatgaatatccatggttgaagtactactactagattagaggagaatttcggcctaagaactgagtggtgttaggctgacacgtcctcgcctagcaacagcatcccaactttgaatcaggtaaagggaaaaatatttacaaacaagctgagccagttgagcgattcccctagccaagttcgtgaacaaatccaacacaagaggctacaactgaatcactcgcatcacaaattcacaatccacaagctaacattctaacaacccagcaagtcgaacgaatcgggtgcagaagtacagctcgctcacctgagatgcgctcggtgttcccctgagccgctcccccgaccacctcggcggcggcggcggcccccgccagcgacgagaagacgcacgcagcgacgatgagcaccgcagccgccgccgccgccgccgctgggacccgcccagcccttgcgcccaccatgagcgccgcccccccgctccacccaccagaaatgcctcgggggggagacgccgtggaagcttctagaagtcgcgagagcttgatcgctggaggaggaagcaaagggaggcagcaaaaaaagggggaagagagaagggaaaatggcaaagtggtgggggggattttgttgcttgtgaatgcaacaaaaaagagagagagagagagggggaaaagaaattgtcaagtcaaggtggcaagcgtaggtgagagcagcgcctccattgaccaaatgaccagctgcatcaggacatcaggaggcactaatcaagatttatgatgttgctaattcgtcattagcatttacttaattactacattattaggaatttagggttagaagatactactcctatttaagaagcctcaaaactaggtgggagcaaccactaactgcttgttgagttggaaggggattactagattagatctgaccacttcagtctgttaggtaccttaggtaggtagaactgaaatctctgctagtacgacggcattaggatctagcaaatcagatccatttacggtgttactgttgcgttttttcatattagccgggaagtaaggttttgcttgtactatccgagtacaaaattcagggatgaacatgtatgtactcgtgtagaggacaatttcgtcttaattaaactgatttattgcatgtttgggcattaattaccatacccaaaaacagatcgttgttccggcacaagggaatattattatgttttccgtcatttcaggttcttgtttaagtacagctactacagtttctccgacggcgagggttcagaaactaatactctcccgtctaaatataaattattttggagggatatgatacgtaggtggtgtttgaatcttctaaagataaagataaaaattaaatgtttcacgtaaaacgaggtaataacatgtgactaattggattttaattactacaaacttaaaaaaatggattaatatgatattttagaataacctttatataaaaagttttcgcacgaaacacatagtttagcagtttaaaaagcgtgccacgagtatttaaattttcatccacctgttacagaggaaacgaacgagaccatactattcactccttcccaaattgatcatcgtataatagaatttaaaatttctcaaattagtcatcatataaccgcatggacacgaatttcatcataatacaattaatacagcatgagagaatgtgtgcatgctaagatataattggcacggtgttttaatcgatgcatgtattatgggagaatgtgtgcatggtgtcttgattaatatgatttaaattattcttagtcttggtgcataaatttatatgatgatcaatttaaaaagtagtgagtataaatctggacagagaacatatcccttcaaaattgcttatagtttgtgatggaaggaatactactaccttgtacactgttgtgccagaaagctatagatcgccaaagtgcaatgaccaaactgccatcggatgcaagtgtggttgagggtccttgtcggcgtggatcgcacgacactacgacagggccatctgattccaacgtgtgtccgctttcaagtatactccacgttgacaccgacggaaacggaagagaggtctcataataagtttaatttttcatctcttttaatttgtctcgaaataagttaatttttgaagtaattactataacgaaattataaaaataagatataattatattgggaatagagaaaatttttgaagtaattactataacgaaattataaaaataagatataattatattgggaatagagaaagtaaaaaataattgtattgggatttaataacgtaagggttattgtagtttttttttgtttatattaatatgtgtgagatggataaacaaatttagagtgaactgcaacggcggttctcaaacttgccgcggtgtgtcatctagatccatgtactctcaaattacactttaacctctctaaacttgattatgcgtccattagtggtctaaaccagcctcgggatgactttttagccgacgtgccatcgtgatgtgaagggtgctagacaactatggggtaatgttgcaaaggggcccttcatttaatccaatcgtcacacacatctccctagagtcccctcgagttcttcgcgtcagagaggaggggcggcgaggcaggctacacaagacggtgatcgccggactagattgttcataatatcatcccagttaatacctccaacttttccctcatgattgaaatagacaaccaaattcatgcacttttcaaccactgaggccatcacatttgtatcagtgttacatgtaatcactctgagaccatcagaaatacccttgcttgataataaccagtaatacttcaagctgggagtccttaggtaccctaaatcctcaactaattgatccaaccacagtggagaccaagtgtctatcttaatatgatcaaaccaactgactttgccatccacgtaagaccgcaaattaccatgaccaacgaaaaaaccccatggtgaaccttgactgaaaactcatccgaatccatacgtacagtccaacaatgcaccaccccatcaattatctaccatctacaaacaggattacccgtgcaagaaaaaaacctaactttacacagaaatagacaaatgcatctacctagcagccaaatcctggaatttctaccagaacacacgtacgtgactgtataccgttgctctaaaggtataaacaaacacagattgctctaaaggtacaaacaaacacagattgaggatcgatggactcaccataaacaggcgcagcttcatcttgccaccatcgtcactccacagtgtcgtcgtctggtccaaattgagaacctcccccaccctctctacccttcatctgaatgaatcgccaccaatcgccggcgatcaccgccttgcgtcacctaccttgccgcacttcatctctgacgtgaagaactcaaggggactctggggagatgagtgtgacgattggacaaaataaagggcccatttgcaatattaccctcgcagttgtctagcaccctccacgtcacgatgccacgtcggctaaaatatcatcccaaggctggtttggaccactaatgggtgcataatcgagtttagggaggttaaagtgtaatttgagagtacagagacctagatgacacacctcgataaatttgaggaccgccggtgcacttcactcaaaaatttattttacgatataggtagttgtagaactggacggattgatccaaggtatgtgctatactgccacatatgctagggtaacacgtgtaagtggaagcaagtatttattccgtttctaaatattttttaaaaatatattataaatgcagacgcttacaatacacacaaattcatccttatgagattgacaaagccaccataagcgtctctctgtcgacggtacgtcgcccaccactgaagaataaatagccgtaaacgcaagaaactgtatcaactctaatatttgaacacgggtagattggttccaccataaaaatacctaaccagttaagttagactcacttcatcgtttctaaaatctaaataattaatacaattgaccattagtcttttttcttgaaaagcctacatggatactaagaaaaaaacaccatattatcgaagtgtgcgaagtaacaaagatcttattttctctatcatattatggaagtgcgttacgtcaaaaaaaaaagattcaccgtagtctcatttgagaggttttagtgatcaaagcttaaacaactaaagtctaacataaatacattacgtaataccatttttacacgatcagttacgtagttttctttcttttctattctttatttcgatagcgagagaatatctagagtcaccttgtttccttggcagagaaactgccagtattatatgggggagtcgtgtgcgactacgggcaccacgctgtccttgtgctgtgcacgtccaaagaaccattttcctaaacataatgaaggaccagggccattcgattggcatacatgaattcgactcgaattttgtacagcatcttaaatatttagaagatccattgactaagcctggcagtagtaggtgagattgtaaagagtatccatggaacattggtacgcattcatcgcctgcgtgctcacaatcagatgccacacttgcttggaacatacccctccgtaccaaaaaaaaaaaaaaatccattcctagccatgaatctgaacacatgtatgtccagatttgtagctacaatttgatttttttgggacagagtatgtccagatttgtagctagagtttgatttttttaggacagagtagtacctcaccagaagtcttcagttcaaaaactgtcccagatgtcttcagaattccataaaatgagtcttcacaccagaacgctaaattggaactcattctacagccattgcatgcaaatgaagcgttcatgaagagccactttacggcttcacatcgatacgtgtcatcacaacatatataaggacacagataaaattaaaatagtgccaagcctacaacagcctatgaagaattgaacagctgagggcaattctatcatcatgatgtcacaaatagtattggcaaaaagtttctcataacaaacaaatcaactacattcaatcacatacacgaagattgaagagaagggatgtcagttgacaacatataagcttcactgtgccagcttgtaagacaattacaagataactcctattgatttcaggtaacagaaccaaacttggaaattaattaacagtagccaagtagcagctcattattctttactagaaggtgtccaacaaagtagagcaacaaaaaggtgaaacgtcaaaccaacagagaatagaagtgccataagattttaaaccctgtggtcaatgtaatctcagccgatgagcaatttgttctcttccagaaatgagtaggtcgggacttcgaggttgtatggtgcagggcccttacggattctacctgatatatcataatgtgatccatggcatggacagaaccagccaccaaagtcaccagcgttgggaagtggaatgcagcccagatgagtacacaccccaatcacaaccagccactcagggttcttgactcgttccgcatcctgctgtgggtcacgaagagatccaatgtcaacgctgttcgccaagttgatgtcttcctctgtcctgcgcctgataaaaactggcttgccccgccacttcacggtcacagtggtgccaggctcaatactagagagatccacctcaagggaagcaagagcaagaacatccttgctagcagacatgcttagaacaaacttcaaaacgagcaagcgcagaagcgaagcataaataaaccttccaccactcaacacaaagtatgcaaacgctcttttacttgggtcacctggctggtatctttcatggttatattcatcatatacaatctttgcactgggattcttcacagctgacactgttgctggaagctcagtcaagcttacatcctggttccttggaacaagagtttctgaggaaaagcctgcaaaagggaactactgttacatgacatcatcaaatatcaacgtaacacaaaaggtgatatgaagataacagagcattattttatcttaacacggtatcaccaataaatttcacacttgaaaatcatctctatatattactatgcatagagactgccattgtgataaaaaatcaaatttattttagtggtaagtgttcaaactccctgatctcagaattgcatgcttgattaatgtatggttacgaactcatgatagcttatgttctgatcaatctgagttgttccaaacaaggaagaacattcaatgttttctacccaggtttctattatcaaatgttagtacatccaaccagaagtcagacttcaacagtaacataagacggtgcacattgtgatctgtaaaacatctaattgcaaaatgtttgatgagcgcacaagcaaaaggtaaaaatggaagtgctgactgctgaacaaccaaactacaatactggatatttgtaaagcattctagaaatggtcacatctaaatatataatgcagcatactaatgcgataagaattatgaggttcctttcaaagtaagtaaaaaactaaagcatgcgtaatctttaccagtcaaaactaataaagaaagcagatcaaaggatataaaatccaaacaaaataaattcatgggggaaatataagttccactgcgtaaaacaaggtatctgaagacaggattcatatttttaacagattctaagcaaacatgtttgcgatagttagaaatgcatactaaccatataggaaaatagcatcaacatctaaacaatcaagagcgctgatcttcataggttgtacggaattggaaatggaagcataacaaacttatagttcacataatgttggccaaggaaaatgccagaacaatgtgagacaagatttatgcgcattttagggtaacagcaaatccatgctgacagcattaggaacatagattatcaatgagcaaagaggagtgatcaaaagtggtttgcataaactaaatgaaccatgtggaatgtgctttcttgggactgtgttaatgaaaataaaacagactggacagcacaaaccaaaatgatattagcattaatcatgttaaatgaagaaactcaattctggcacatctttcccaaagcacaaaagaacaggagcattagcagtccgcaactccacaaatgtggtaattaaaccagaaagaaattttactgaagtatcaaaaagaggcacaaatctaactatggatttcaacaactacctaatgcctggctagattaattactaataaaaaccataatactgaacactatagcaagctttcaaacttgcattttcaatattatcataccaagcttatctttgctcagaacagtgatcatgtagagaatcatctaatatttctgtgctgtggtatgaacaaggagatctcacacatgagtatacataacaattctaagatagcattcacaaggacttacctaaaagttgctctatctgagtgtgggtcatcaggaaagtttgcgcgtgaagaaaaattgcacataattatatgatccagctatccactaaccaagcccacacgtgttcagatgaagcatctcatatgccacatagacattacgcatgactatttacgtatctggagtgagcacaaatcaatcaaaagagcgttcacaacgaattcgactcagttgaataaacggaaacacaccaaagcataagcataacatcaatcgtggaaaacttctaatatccaatcatccctctagccgctaaactaaaatacaaatccaatcatgcgctcgcaggctaggaacaaacaaggtatgaacagagaacgcatcaagcatgcatggattacatagagatcaacgagctccggaagcaggaaagcatccaaaaaaaactaatatcaaatcaccgatcaggaaccaaacaaccgcgactaccgggatccccctccgaaaccctgggagagcaggaagaaaagctggatcccccccccccaccccgaacccacgcagatcagagggcgggaggcatgcgggccgcgtacatacccctcgaagcggcgaagaacggggaatccacggcgaagcgcggcctctggggctcacgcgagaattcgtcgtcgccggggagggagcccccggcgagcgggcccctggcgccggccgccgcggcggggcgccaggcgagggcggtggtgaggcgcctcccggcgaccctgagcatggcggcggcggcggccttcctctccggcgggtggatcgggtgggtggagaggagatcgggtcgaggcgaggcggcgtggtggcgtcacggagtggacgagaattgcaggaggagagagagaaaaaaaaaacaagaagggaaggggagcacggaaggatgctggcccaggcccagtactcgctgggccttgggctacttgcttacgtcggcctgattaaccctcgtgatttttcttttttttttctttttttactggttctatctaactagttgttgacttgtttccttggaatttaatgggttcagatcggaatggctcaagtgatcggtttgcgttggcgtggtaaggaacgtgccacgtgtgtctgttgcagcacacgacttggccacgtgcatacggtgctgtttttctgtcaaacgaagcatctttttcttatggttgaaaaatgggcatatataacgtgcaaaagtaaagttgactgagcacaatctacatgaaaagtctgtaggtgatcacacaatattatttttataatggatcttttcttccattaaatacatgcattcattatcactactacataaaagagattggtaccgattaaaaattgatcacaggtaccgggtttccaaaccaacacccaacaagtgacacctttaaggaccaaaggtgctagtttaggaaccaatacttttaaggttctagtaatggaaaaaagaaaaaaaaaagctaactcaatgcatcggctcgattcgagaaactctccatcatcactgagatcaatatcatccccatctaccaaacacaatcaaaatcatcattgagatcattatcatcccataaccaaacacaatcacaaaatcaacaaaatcgcaaacacaacacatggagaacgccaccgtcacggcagcggatctggccccgtggtcgcagcaatgtcggccggttggagaagaggaggaaggaggggtagcggcggcggctaagaaggaggaggggcggcagatccagaaagaggagaagggaggaagaaggaggggcagtggcgggtgcttaggaggaggaagtaggagtggcagcaatggataagaaggagcaagaaagggcggatacggttccgatggggtttcacgagtagataacataagccggctcaatgggcagatttttttaaaaaaattaattataggtgtcggttttttaaagaatcgatacatataaaattagtataggtgtcagttttgttttttgaaaacacaagtacttataggtaccgagttttatttagagtcgacacctataagtttttggaggtgtcggtattttttatctcgtgaaggtgggaaacggttaataggtgtcagttttaaatgaaccgacacatatgagccatcacctattaaggtttttaagtagtgtataaggttttggctcaatagaaccactatataaccaacctgacaataagtttggactcatatgcgctcacacatatataacacgcgataaccctacatgtttgataggcatttttcatccaaacaacaatgggttgtgtgctctcgacgggatgaggcttccatgactttatgcagtttgtagatgtgccactgatatatacatctcacatataagtcagaggatccacttccgcttttgacacacattgttatccttggcctatttccaatgccctcatgatgaatcatgcaggataaggaaaaccatgtagtggaaatatccggtagcacaaatgttatctttggtagtcttggtagcacaaaggcttgggaaggagaagatacttaatttcactggtgaacataacattggatgatcaattgatcccttttctctcctctattcatagaagtgaatatgttttcattggtaagaagaggggctacaaatcaatcgatgaagatcaattgatgaagagtagtccatgtataatggttgtcaatttaatcaagtgaactaattttactaattttgtgggctgatctatgcccatctcttacactacgcaccacgactatatgatcataatattgaaggtcaaagcagagagaattagattccctccgtcccaaaatataaacatttttagcataatgtaaagtcaaacatttttaactttgactattaatagcaaaaaaaaatcaattatatcctataaccaaaattattacgtgttaagtataaaaaatacattactacgtatgaataagtctacaatttttagtgatacgtaaagttagaaaatattcattgaacaactatttatctctgaaataaagggttttgttttaatatggggtgaggttgatgataagatccagtggctacaatttcagactaatgaaaaaagaaacccatgacaatatgcaaagatttcaatcacctgtaagctagtctctccaacataagaaaaatatatatgtccaaattcatctctgaagttgatttttattttggtcaactagaaatctccacaaccttgaaaatccctaaatcatttaaacaactattctcattccttgaatacaaatctaattgatctcactggtaataccttttctcaacagtccctttcctccttagttaacatgttaaacattttcacatagacataaaatatttacaaaaattttgatatgaaaatattcataagtgataaaaaataaagcaaaaccatacacatcaacaaaaaaaaatagtaaatactgtaaaaaatgcacaaaagttatatcttacctaggactacaatttttagaattagtagtgtgttaccttaggtgacaagaaatcaaaagttttaagcgtaaaatcgagcaaataccttctgaaagacaaaggcacaaaccaaattaaactaccccgttgcaaggacatgcacacgcacacagcacagatgctgaaaaaaacaaaaaatatggccgccacccatgcatgcccacgatgacacgagcgtattcgatctctctcgcgcgcgctagctcccgtggccgccgccgtgaggccacgcgctcggcgacgacgccgcggtcgtcgtcgtcggcagcgtcgacggcgggcgcggcgccatcgccggagagaccccgacgagccgctgcgccgcgaagtccaggatctgcgccgccggcgccgcggtggccgcaatgccggccacggcggcggcggcggcggcgtcctccccgctccgcagcagccgcgcgtactggatcaggtcggggaacggcgccggcgccacggcgggcgcgggagcgggaacaccatgcggcggcgggcggggcacagcgggggagacgaggaagccgccctggccggtgcggccgcggacgcgctcggggaagttgagcttggccttggcgcccttgaagcggagcgcggcgtcgtcgtaggcggcggcggcggcctcggcggtgtcgaaggtgcccagccagacgcgcgccgccttgttggggtcccggatctccgccgcccacttgccccacggccgccgccgcacgccacggtagtgccgctccgccgccgccgcacctgcagtcaggcacacgcgcacgttcagaattgcgttcttcccccttttgctttcaagaagaaaatttgctttaacacgagtagaaatcactcgcaagctactctatttttcaagaatcatacagcaagttaatcactctaagttattatcaaattatgtgggattattaaacagccgatacgtgattatagttgctctatccgttttatattataagtcgtttaatttttttctatacttttagatttaataagtttatagaaaaaaatattaacatctataacaccaaactagcttcattaaatttaacattaaatatattttgatataatgtttattttgtattaaaaatgttacattattttactacaaacttaattaaattttttagtagtttgattaagaaaaaaatcatacgacgtattggaggtctggaacactaatttaaccatcttaatctacacgaaataggtaaatttgattgcccgaagtttctaataaatagataaaccgatggatctatactcttgtagatagcttacggttaatcatagcgatcatggcagcttaattacgtacttggatagttggattacgtgtgtgcaactgtaacacgtacgtaccttgcgcctccacggcctgcagggcagcggcggcggcggcggctgaaggccccaccggccgccaccgccggtcagctgattccgacgacagcgtcgccccggccggcgcggcgaggtaggctgcggcggcggccacggtgaccacgtcgtccaccggctgccactgcggctcgacgtcgtgccaatccgggggcgcgccgccgcctccggatcctatcggctgccgcgacgacatggctgagctgccgctgccggcccaagcttgcggcggcggcggcgattggtccggccgaggccgacgaggctgcggatggtcgtcaggtagaggccgcttcccatgcctccgatgctccaccttaattagtttgctgctttggagatcttggtcagcttcgcgctagctctctgaatcgatcgctttcttgattgattgagctaattatcaagctaaaaaatacgtagtactagataattagtggagccacaggagaaatataatcgctcgagattaattcgaagttggatactgggaatggatatgatcgatatgggtctcgtcgggagaatactatctttttgctttgatatggaggaagaaaagaagcaaactgaagcggagaaagtctttgagtttgccttggcatccctcttacgtgtatacctcaaacgtggttgttaatttccctacgtgcacatgccttccggcgcgcgcacacacactcttctttttacaccacagacgcacgcaccgctacacacacaacaccacactctcacccccgtgaatacttaacacaaactctaaaactctaaaagacgagaaccagcggcacatcctagatcccacctacatgattagattgtgatttgtgagctattatatgtacgacttgcaaggtataggatcatttaaaaaaaaacaagggtatgaatgttttttcatgttattaattcctcatggatttagctgttcagagttgctctgagataacatgcgctgctatatagtggaacggtataatacatatctattattaattaggatataattgaagaatattcaaatgaaatttggaggattttgatcattagaaattttttcttcatttctcctagctcgtcagctcgtgcgctctcttgatttccctctcgagcatctctcttgcatgaaattaaataacttccttcaaaatttctataaatgttttatgtccttcttccagtgcacaaacccaaaatttatgtgttctaaaaccctataggaatccaaagcttgtgacattcaatttagattaaatttctatttacaaataaataaacacaataagggaaccatgcaccaaattctaaacccaagctagatcaaggcgaactcaggtaggtacttcattgataccctttaatttggaatatgaaagtagctctgggccatttggaggactccgtgtgattttcttttcacgcaagacggcctgtcacgattgagaggggaaactcttttaattacctggtggatgttcacccgtttattgcatgccatctaaacaattataaaaaaaattgacaatataaatcaatatgtaatatatcactccacaaacattaaaattcaacttctacaaattgtaacaaaaataaaaaataaaactcaaattagtaaggtatatttgcaattatattttttatttttgttacaacctgtaaatgttgaatctgaacttgcatgtttacagagtgaatattacatattgatctatcttgtcaaaatttttttaaaaaaaatcataaccatttagttgacatgcaataaacaggtggatctccacccaagtgattagaattcatcttccgatttagaggtttaaattaaggcttttcgccgtaagtttgatatttcataacatcaacttgatcttgtaaggtgatctagatatatattttttataggccgggcaagcttaaaaacagatgatgattaaagtagatataaaataaaattcattctactctatacaccatttactcaagcaagggtggaagttctgaattaggagagaggaaaaccagtagaaggtattatcaatgaatagtcgtacacttgtgtattattgacaggctacatttatatacggagcagtcaataatacacaaatttacaactatttatataagtgtagtctgccaataatatacaagtatatttagtcggatataaaacggatggttgggtcatatgcatcaatttccatagattgctatgcctatgacacggtgaggacggacaacatctcatcatgggaccaagtagatgaaatcatgaaagcatgtatctgcggcgaccctaaatcatagcttgggtgtgttcttttggaggggttgggaatctctcccctccgcacgtaaaacggagcgataaattaaagcatgattaattaagtgttagcagaaaaacttgaaaaatggattaatatgattttttaaagcaactttcgtatagaaactttttacaaagcacacaccgtttagtagtttgaaaagcgtgttcgcggaaaacgatgaagataaattgggaactaggggttaagagtccagcaactttaatttctaagtggtgtatgatagtgtatataatcgtttagagtcaattgcaacttaatttgcaaaaaaacaagttgcccgacaggatggtgcctagacagatactgagggggttgcgttcactgaaagaatggccggcgccggccaaccggaagccgatgatccatcacgctcagcaccacgcaagagatatcgtgtggtccacacgattacatacgatcgatctatgcagcggccgggccactagtcaaagatacgcagtaaggagtacaattggtcgtccatctccatgatcatgcacttacgtgcagtgtaccaaacgggtcatactggctatggctgtctagagatgggccggacgacggacgtgacggctcgatcgatgccatacggtgcgaggggagctagcttttgcacgcgtcgcacgtttccatgcagattaattgtcacagagaggaatgcgagcaacacacggttaatttagctagctcacaattatataatactacatattaatttgtttttacgactatgtattactactattatactttgaccgtcaatttatcaatagctataaaaaaatacttttagatgcaaatctgatataagataccacatgtggtatgcttaacatatgcattattaattagttaaatgatataaatattatttttttcatcttatattttcagacatagggaatttataatgttattgataaataattatatcagaagatatatggtctcttgaaatggaagattttcagagaaaaaattacaagaattaaactagtttatatggagccttgtaaattcgtgtgttctaaataaaccctaaggctgagttcaggtaactccacctccccgcacgaaaaatggtgttccccatcaacatgtgattaactaagtattcgtctaaaaaaccttgaaaatttgattaatataattttttaaggcagctttcctatagaaaactgaaaaaaaaacatcatttagtagttagaaaagtgtgtgcagggaaaacaagggaggtcagttgggaaaaaaggggaagaaaacaacctaaggctcctttgaagctcacggttttgaaagcatgggaataggaaaaatcaggaataaagtgtcctttggaactccaaaaacaactctttatttgaataagcctttcagctcctttcggaacaaagtaaaaatatcaaaattatagatttgtattctgggaaaaaaatctttatagttttttagaacaaagtactacaaattcctttgaagttactatggaatgggctattctaaagtaattttagagtaaaataagcataagatctcaactaatgttttcttcttgtatcttgagctatgcgtttctcctctgtcattgaatcgataattacattttccccctattttttgtgttttggcaatctttaatctagcataattctatgctcattaatcccttcatctcatagttcttttattacacaagacacaacaagtgtgccccgaacacacccttcaagatacaaaagtcctatattaattaaaagcataattgaatgcacgtacgtaagtattcatttgcatcaggattaggatttaagtatttacccatgattttaccatcacgcaacatcttaagacctgtctaggaattcttaattataatgggaccacatgtccacaactagtgtccaccgcgtgcagaaaatgcgtagctcctgttccgacgagatctccactgaatgagatttgtcctctttttagacatctcctctccttgtgatattattatattgcgattctagaacctgaatcctgtagaactgcaatttgtacccgcttacggactgtattctagttttagctggcataacttctgacagtggcgaacgcaggtttaaaatataaatagggcggtagagctagctctaatcaggtgatgacacaacacacacaaacgctagttgctgcttcatggcattggctcttcagcgcacgacacgaacatcgagaaagttaacaacgaatattagtagtcgaacaaacgtatgacttatatgtagagagataaaaaaaataagaaatattattacacaataaggggaaccacttttaatagttcgggggtataaaacgaaaaattatttaggggtttaagctgcttcgccaaaatagttcaagtgagtaaaatgatctttttatatatttaccaatttaactatttaccaatagactgtatgatgcgctaaagaaatagaaagaaaatcgaattttatgtatggccaaaatcaggaacggtcaaaatggtaatacttatacatgaatttttataaatatttttgttcctacttaaaatacttgatttatctgattattcaatagtagactgatgactaatatgttagaaataggactagaaataagatttgggggtttaaatgaagagtgattggagaaaaatttatgaataatcaaaatataagaacccaaaacatggactaaaatttagtcggggtatccaaacaggacctaaaatttagtcggggtatccaaacagaacctaagtatcacgttgtttatattatattatcctcgtcatgtcgtgcaccggcggagttctggacatagacgatagctcaagaacacgacaaagttggtaaatgaattcaacaatcaggtagatgcaacgcgcagcagctgacggaattagggggtgtttgggagagactttagtccctctctccaaaaaaataaatccctagagagagggactaaagtttattctctctcccaaacacccccttaatcatccagaattccatatagaagagctttccgatgcatcatgcggtggcattgacatcgcaatagcaggggaagtattgcaagctactctggcttcagaattatgtgaagattgagaactgcactgcactgacgcacagccctaagtggagtattcttggtacaagtttctgagattgtactaatactaacaaatatttaaacacatcaaagcgtcagtgcaggtaccctgagacaagataatgatagttgtaacgacaatgcaggtataacaacaataaatatcacgacaacgcaattggtacaaccctcaataagcataattaacttctaacagaactatatgtaacatcaatataacaccagaacatggtagagttactgacaaaaatgttttttaccaggtacgcacaaagagtcaacatggggttcaaacccttaatttcaagacatgatcttacacgcaggtatgaagaagacgaatcccagatagaaaccgctaatctgaggaaactcagcaccataaccagaatatagaagaaaaaaaaactaccactcgcttgatttgagcagcaagttcgaaactacgaacctttgacctttacacgaatcatacacaattcaaatgtttcttcagagacaacagtttccaatctgcagtgccaagcaattcatgcctcaattcaattgccctgcaccacattgtcaacatgagtagcaacaagacaagtacggacaatgcgccactgatattagaccttggctacaaatttccagcagatccatatttcttacttgtaacatgtccagactatccatctttccaccttttcacacatcaatggctttaaaatttgcatgatgatgtggcccaacagccaaaaccataccaacaagaccattagaatgtgcatcttctatcaactaagaatcacaaatagacggcaccatatattaactgattgcttgaatttctcttgttctcatgtaggtcatgaactgccctggtatttcagcaagaagtgactgaactgtcgaaatcccactgcctgcaagcacagaattgaattatcacatttgcttagttttccatgtaacgcaagataccaagaatcatcacatgcagaaggaaatgcataccatgggcatccttcattggggcgaactgtatcatatcccttgatgccactcttcctgttgagctttctagtctctctcctttatttggatctagaaactgcaaggtgcaaggtgaaattttaacatcaacttgaggttccacattttttgtatgacgctaaagcattagcaatcagccaatcacatcatggcattacggtacaatctgtcatacttatgtaaacaaaaaacttcagaaaaaatagaactgacagatgatatggttaacgcttgaatttttgctctgataagaaatatgcagacgaatcataaaagtgcaagaaattttccagtcccattacctccatttccttgaagtccgctccaccaactccaacaacaagaatggacaaaggaaaatcagatgcctttatgattgcatcgatagtctcttggaaatcagtcaccacaccatcctggacaacaaaaagaataacattgacagcacagaagaaaaaaaaatattattttaggaaaacatggattcctctttatgcataccgtgactattaacagaacaaagtatttctgctggttgttggcaagtgattggtttgctattgccgtagcagtgctaactactggaccaaatagggtgggcccagccaatgagacattacgaagcgcactgatataagctgacataatcccttgtattccctcaacctaaggaagtttgatatagtcaggcactcaggcaataggcaaacagctaacagataacttcaagaaacatctcaaaaccataaaacaccaagtacaaaatttcttacaaaagagaaagaaatgtgttgtaaactaaaataagatgggcaagaaaaggaagatttccatgtttgtttcccagatgtggcacttggtaattcttctgcagaagtcggtagtaattaaggtagcaaaaagtagaatacctcaggttgataggtgctaccattcaggttgaaacagtgggaaacaggaccatcaataggtctagcaccaaagccccatgagggaaaccgcttagctgggtcatagtactgtagtacatctcctacttccagtattgcctgccaccaataaaaaacagtggaagtacttaaatcaatgttctcagagggccatcggaacacaagaactaagagataatgaatcaattgcttactctctgatatgcatttggccgaccagtgggatcaatataatgcaaggaatctggaagccgtggatttccatttgaagctacagagcacaaaacatcgagggcaacgaattaagtatgagtttatgaactagagagctgaaatagggtaagatcagcaagaactagcacacctgtgaagtctacggctaccataaaattcaattggcacccagcagaaatataatctagaaaagtctgtctgttgttctcaagatatttctccacatacacttgactctttagtacctacatgcaatagtaacactcagttactacaatatagcaaccgcagagttctacagtaacaaatattacctccttactgtgactatcatgagcagtgctggcaggaacaaagaaattttcaccatcctgactatgatacatcttttccaattctgcgaccgattttactatcttgctgtcgaattacaaagggtatctaatcagaaaagaaattggaattcaacaattaatggcccaggatctaaggtaccatagaacatactagtaaacagaataaacagcaaaaacaaaattaataaagggacatgcatttacaatcagagcaaaaagcatggtgagatacgattaatcagaaaacaaattggaattcaacaattaatagcctgggatctaaggtaccatagaacatactagtaaagggattaaagtaacagcaaaaaataaaaggacatgcatttatagtgtgcaaaaaccatacaaaaagagaataattaccctattaggtcatgtttgccgttgctactgaagttgaagcactctatgattaaagggttctcctgcaacagaatatacctggttagtttcatacaaatcattggtcattggccaacataaatagaaaatgcaaaaggatgaagaaagttctcatgccttacttccaatctgttggagattcaagatcactggcttccacttgggattgaggtcgttcttccttacttccgtcttacaaattggaacaggcactccactctctgatattctagatattagtaaaaagggatcctgtaacaagcaaacttagaatggtaaaaacacttacaatacacagaataaacaagtcgtgtttaggtacagagaggcatggacgaactgcaggtacaacaatggtaaatacatacaaaataaaaatgaacaaggtaatagaaacataagcttacactttttgagagaaggtccttgatttcaagatctgaacagcggaataccatctccattattgcttttgaaccagcactttcttctgcctgaacatttagttcaccaaatttactaggatttggtaggttatgttcggaaacgccaagctttagagtcaacagtctgttttgtttagtgataacctgcaaaaacatcatgatcttgtaaaaaattaaaaacgccaagcatctaacataaggagtaatcttcaaacagactaataatacaggcttttgaattggcgttactcttaatctgatacaagtgtaactttgcaatcatgaaaagagatgtgctcatagtaaaactacaggaatttatgggtgttgttttgtagggcaccaaaatggcagaagctatatatacatgcatgtgacaggatgaacctggtctataacagaaacagtacagaacagttaagttttccttcacaggttaagtttccttttacctttaaattatcaaaacaactccaatagtgtataaatttcatatatgacaaattgaagagtaggaagaatacatggaatccaccttacgtttaaggccttttcaatgagttttaaagttctccattccatgacaaacagtacacaataagaaatcatgtgtcaacataaggtattatgtatattaaataaccgagaggaataaatgaccacaaaatttttttagccaaagtcaggcatacctcagacaaaagacagacagcctccccaagaaattgttgctcttccagtttaagcatctgtgttgaatatcatattagagtaagtattgtaaagtaactgaaagaagaacgaaagaagaatgtgctcaatagtccatacatcagatgctctaacatcctagaagaatcaaacttctgcatttaaatgtagcttaataacatcagcacaaggaaatgctagggactagaaagagcaaactaaggtaattcaaatctatagttatcataagcacaagcgttaattcttagtatggagtttattttatgttaggcataaaattaagacttcattcaacctaactcacaaataactgaatttacgctacatttatccctgctgaccaaagggtccctctaacatgccagatcttgtcatctttggactttataactggctgaatggacaaaaagatatttgaaagcaagaacgaaaacaactaaccaaattaccttttcattgacatcatgaaactgtggatcaatgtcatatacctgaaacctgtaaagaaagttagctgttaaaagaatagcataattaatgggtaccatgtgacaattttacagtaaattgtaacagacgcttacacaattggttgaagaacctcaaactggtagtgcacgttgattcttgcattccaagatgggttcaaagaattcaatattacttcagtacgcccaagttcttcaagtgctccttctttgcttttagaatatacaatgaccatgggattgctctgagaaaagatgataaaatattaagggaagtataactagatagcacaagcagaattcattaaatattcaggatggcatgcatgtcaaaagaaaggtgactgcaactatttctgcacaaatattcaccgaggcttccatgataatggcatgggcgctctggtttgtaaacagatcaatttgtaatttgcagttatatggactatgtcttttggatatggatggatatttactgatatcacgtattcacgttaaatttggttgggtgtgaattatgattggatataggcacgtagcatggacttccaaaatattcatctgtaggttttacaaaatagtctccggacggtaggagccaccagcatgaaacttataacaggtaacttagaaggcagctcaggcagccaacaaactagtatatgcaactgttcaagctcaagtatgatcattgccaacaattcactgggtaagtcttagtttgccaaaataccaccatggtatgacaatgtcaattgccacaggtttgtgtgtttgggagacaggaactgaacggaggcagtagtggagtagcaggttcaaaggaggacaagggtgacaccctcatctccccagcaccatggaaagctaaggggtaaggtattcagggatagcatgcctataaaaatatgtcaagttgtcaacacaccaatgaaggtggaaaatgggatgagaagtgagtagtccagtatggacagacatggtagcatgttgacaactgatgtggctttctgacagaattgcagtttttttttacaagtattgctctttaacatggtagctctcagctatttggaattcgaatttgagtttgtggttccttgatagaagtgaaaataaagttatgggtttgcaaaatctattcacaataatttctctaaaaatctaatgattcttaactaatcaaaaacagagatgtcatgcaatagtaatgctcatcgtagatacctaacagaccagaataccgatcagttataaactgaaataagaaaatagcaaaactaacaaaatgcaacaagtgaaaacctggagcataccttggtaaagaattcttggtcgcccaaatttgatgcagagagagataactgtttcaacaggttatacagagttcttgtcaaaataaaacacaattaaacacaccctcatcagttcggtaattgcatttctatcagtaaatccaaacaagacataaatttatacaatgcacatgcatcataatagtcatcacatgaagcaacatcacagtattaaatatttgaagtttttggattaactaccaggtcaggtagtatgaaatgacagaaatacttagccacacaacttgcagactcccaagcgttcaggcacaaaatcttactaataaaccacaaatacagtaaatcatcttttacgcaacgttatcaattagaagaacatcagcagccaactgctgcagccgtcagaacatcagaatgttcagtgccgtgtcaaaccaagagcacacggcatgctcagatttcacgcccgctcccaatcatcgtcgtgtaatggttttttatcccgatcaacacgaaatccctcgggttttttctcctttttttttgtttgtttgtttgcaaggctgagaacaggtagcggagtaaattagctgaggcacagaccacacgcatccgctagtcccgtcgctgcaaggcgcaaaccacgagactcacgcagaacggcgcgaaactggagaaccgccagcgacgcacgcaaccgaagcgcacccggcgcaatggcacggccacccacgcgcgctcgctcgcgagcacctggcggcgcgctactactactactactgctatggtgtgaagcagaattaaaccgcatggatggggcgtgaggcggtgtgtgcgttgtgtgtgggttttccgcacctcgacctgcgtggacgcgccggcgccgcgggagcggaggaagcggtcggccgcggcggacgcggcctccgccgccgccgcagccgcggccgccgcggggccgacggagtggcggcccgcgtggccgccgccgccgcccatctcgtcggagcagcagttccccatggctagtggctctcctcgccgtcgagcaggagggggaggaggcgagcgagatctaccgccgacgcatcgatctggaggtgggaggaagagggagagcgagagcgagaggagagcaagtggagtcgtggagacgacacggagactttggacccctcaaacactaggcgaggccgagacgcacgggaggggaagggacggcacggcacagcgaaacggggcggaatttacggctttgtccctgttccgccggggggggagtggggcccggcgtccacgttcaaggagagaagtttgactttggttttgactggcccggggagttgggacttcggacttgggaggactggttcctcgtggcaattagggatggcaatttcccccgcggggccgggtcccctgcggggacccacccctacgggggcgggggcggggccaattttcgacccgcgggtgcgtcggggacggggccccgcatttgggcggggaggggacgggggactgatttcacccgcgggcccccggggagtacatataaatctcaaaatatagatcaaagaaagcccaaaaagcccagcccactaaaaaaatccttaaccctagcagcactgcagcacagcagcagtgcagcacatccctcagtctctctcctccccacatccattcccctcccctcccgtcatccactcatcccgtgcggtgcggctgtggcgtcgcctctggatctcgccctctcggcgtcgccggcgcctgccagccgccaggccaccatctcctctcccctcctctccagtctcccatccggcgtccggcggctcgagctcgtcctctccctccggagtcagcggcggcggcacacagggcggcgccgcggcgggccggcggcggcgcacaggcgcggcggggaagcgacaccggcagcaagggcgcggccggcggcgcacagggcgcggctggcggcgaggttgcagcacatcacaaagagtgagaggtattgctccatctccaatactccaaatgtgccttgtgatttgtgaatgaaattatgaaacagaagattgtgatctatttcagtgtatatttcagtgtatatttggtagatttggtagtacatagcacatagcagcagattgtgatctattattgaattatgttatttgtggacagaatgtcgaaccctgctgccaccgttgagtcacaagttgcattgacaccatcttccacttccactcccactccaaccaatgctccaagcgtcgaaataaatgattcacaaggtacagaagtagaacatgataataagagactgaaatctgcagcatggcaagattttgttaagaagaaaataaatggtgcgtggaaagctgaatgcaaatggtgtcacaacaagcttggagctgaaagtagaaatgggactaaacatttgttagaccatattaaaacttgcaagtctaggcatgctagaaaaggtctaacacaatccaatttgaagatgggaatagatgcagaagggagggttaccgtagggaaatatgtctttgatcaagaggttgctaggaaagaacttgcactgatgatatgcctccatgagtacccactttctattgtagaccatgttggttttcgtaggttttgtggtgcattgcaacctttgttcaaggttatgaccagaaacacaattaggaaggatattattgacttgtttggggttaacaagatttctatcagtaattattttcacaagcttcagagccgtgtggccattactactgatttatggacagcaactcatcaaaagaaaggatacatggcaatcaccgctcacttcatcgatgatgaatggaaattgaagagttttcttttgaggtatattgaatatgtgctgcacattatgctatatcatgcttcttacatttgtttaactctatactaatgttctcttgtggtgttttatgttttgtaggtttatttatgtaccagcacctcataccgctgatcttataagtgaaattatttatgaggttcttgctgattggaacttggagagtaggctgtctactatcacacttgacaactgcagcaccaatgacaagttaatggagaacctattggggacaatgctagataagttgcctgctgatactcttatgttaaatggttcattgctgcatatgcgttgttgtgcacatattttgaatttgattgtgaaagatggaatgactatcctagataaaatcattgagaaggttcgtgagagtgtttcattttggacagcaacaccaaagagacatgagaaatttgaaaaacaggcccaacaaataaatgttaagtatgagaaagtaattgcccttgattgcaaaactagatggaattctacttatctcatgcttagcactgcagttttgtatcaagatgtctttacaaaacttggaactcgtgaaaaaatgtatactccttattgtccatcaaatgatgattggaagtttgctagggagctttgtgatagattgaagattttttatgatgcaacagaggctttttctggtagtaagtattgtactgcaaatcttttctttcctaaggcttgtggtatttatttggctatgagaaaatggtcaactagtgctgatccaaacattataacaatgactaaattgatgtcagccaaatatgagaagtattggaaggatgtgcatggtattttggctattgctagtgttttggatcctagatataaacttcatatgttgaatgctatgtttatacaaatctatggagaagaggtggcactaagaaaagttaatgctgtgaaagaagacttgtataagttagtgctacaataccaaaatcatgttgaggagggtgttggaacttcagatggagttaatgcttcttcaagtgttgcccctccagggggatttgatttggtggatgatatatttgatcagtatatgtctggacaaactgttgcctcttcctcacagattcgcactgagttagatttgtatttggaagagaaaccgttgcctaggacacaagattttgatattatcaattggtggaagtttgggggcattaggtacccaactttgagacagattgcccgggacattttggcaatccctattacaacagtagcatctgaatcagcatttagtactggtgggagggtgataactccaaatcgtaatcagcttaaacctgatcttgtggaggcacttatgtgtgtgcaagcatggggtcgtgctgatatgttaggtaatttcatttttgcttttgtatcgttcaagtttaatttgtcctttcatgtttcttccatttcatctaattgcaaatcacattatatgttgatagctgaaattgctaacaagaccaatgcattgaacacggtacttgacgatgaatcagaatcggtatgtcctacactcccactttattgtttttattactataacatacaatgcttagttgcttcctctaattttgatttcaggaagcatctactgtcactgaagcttgaggtggagatttcataagtgaaggatgggctagaaagcctgcaattgcaaactatctacctatatattttattatgttggcaatgtaatagtatattaagacttctatatttctgtgagactgaatttgcttgctgagttgctgtgtgtgatgtgttgaacaattcaactgttgaactttgaaggcttgattcgcttgaacagttgaactcatgtgtgttagtgtgtaactgtgtgaaatgatggatatcatcaatgtgttcttgctgaatttttatgatgaaattgaagtattcatgctatttttgatggtgtgttaattatgtacaatatttctttttgatgaaatgatgattgtgttgtattttttgagctgattggatggagatgctacccaatgcggggccccggtcgggttgcggggccccgcaggggtcgggggcgggggatgttttcaacccgcatcactggtcggggccgggggcggggggtgaagtcgggggtcggggtcgggggcgttccagcccaacccggcctcgccccgccccgttgccatccctagtggcaatgcctgcccttttacggctgaaaacggtaaaaagaaaaaaaaacgcagttacacaaccagttgttacgggatagtgactccttcctttcctcgtgagatttcacgtgtgctccctcctgatagtctgatacctgagaccacataccatagcgcgtgatacctattcaattcctcctcggcatcgtacgcacgatatctcgtcgccggtgtcgctcctttgcagccggagcaacacaacacaacacatgctgatacctggtactagtatggtacaagctacatggtgtatggtacctgatagctggtacatgtggaattgggggattcaagaggatgggacagggaaatcgacactatccatataagccggagaaaaaaatcagaaaggaaatcatcaagcaaaaaaaaagagaaaaacacacatgacgaagggatgcaagcggcggtgaagcgctgctggcgtgggaggtggaggaatcagccggagtggaatggaatgcgaggggtaacactgcggcgtaggggcggaaggacggaggagctcgtgctcctcgtcgacgggggtggcagcacgagagctcgcacgccgcttcgccgccacatgcacacgcattcctaagccagcgggagcagctccgcgtggtgttgccttccccggtgctggcggaggagggagagcaaggcactggtgaaggagagcgggccaagcgtcctccgtggggcagcctgcttggaggcgacctgcaccgcggcaggcggtggcttccgccgttgatgcgtctgcatcaccgattgtgtggaggagaaaaaaaaggaaacagaagggaatgaggtgggagtggggattagggttaagtatcccgtctccacgggaaactgtgaagtagattctctggaaaaaaaatcgaacacaaaaagggtataaaaatattgaaatatcatgtttgaagaaaagggtaatactccttccgtcccaatatgtagcaatataggataagattagatccatccttagactacgaatttggattagacccatcctagtactacgaatctaattccatactagattgctacatattgggacgaagggagtaactgttggaaaatattgaacaatagaatcacacatttaactttgagaaaacccctcgtatatgcctgaaattttagctaatcccttatatgcccctgatttttgcttatttccttatataccccaaaatttgattttgatcctttaaatgcccctcccgtcacttaaccatctaattccaataaaaatgatcatttttttttaccctttggatgaacatataatttataaactgaaaatgtataagttagtcacatgagactattctatttatgaatttgccgtgagatacattatttatggtaaaatttatttttagataatgaaataaaaaatatgtatttattttattttttaaaatgtcataaaaatgatgagcattcataaaagataggactaccaatacccatgatattttttatgaatgctactaaaaaaccatcgtcctattaaaatctcaaataagaattttaatttattacgtttgttttattttcaaaatttatgtcaaaatttttcgccctaaatatttggtctcattagtttcataaaatgcacatattgtgcactcaaacaaaattttcaatcgttttcaaacctaaatcatcaagagcataataaaagacatttgaaccaaacttaagagtgaaatgacaaaaaatataacggcagggacatggaagggatcaagttgaaatttcagaggtatagaagggatcgggtaaattttaggggtatgaatgagattgagtgagttttcaagggtatacaaggaatttactctttaactttacacaactatataatactatgaaataaattcaaggtcatactttacaaattatctcctctttaaccttgtactcaagtcaggaatttgattgatgagttaatgtcctgtaaattattgatcaaataaagaaatggatcataatactggtgtatttagaaatacggtaatactacaaatataaaaaggtaatttccgtaagaatacagttaagaataaaaaatggtggatgtacaataaaattgtttttttatctctgcctccatatttgttttcatttataaccatttttaattgctcggcaaaaaaacgaaaatgaacaccggttgttcaggaatttcaatggttgcttttaccccaccctacaaggaaggtttcaatctgaaaagatttaggacgagatggatactagatcaattggatttgccacatcaaggcgtggatgaatttatctttgaactataagtattctcttttcatgtttaacaaggatggttgagcaaaaataaaaacaattttacacattcaggtgaaaataaaccttgggagtatcgtcttaattcgcttcgatttttgaaaaaaaaaagtccattttactcgctttaaactatttcactggataacttatctaccctaaactattcctttggctcataattttacactacaaacaattaaaaatggttcttttcacttctttaaaaagaacttctttatcactatttacctaggttgggcgtaactaagtctagtatttaagcaaacaatcataaaaaaataaaaaatgttttcaaacttagataaatgtgacatctatagttgtaaaatgttacaacttaaagtatactatcttatatgaggagagaaaaagaaagataaatattattaggaagtcgagtggaccattttcaatagttgagggtaaaataagccaaaaatggtttaaggggttaagcatttttaatggtctggtgtaaaataagctaaaaatgatttaaggggttaagtaatgcaatgaaataattttggggaatgaaaatgaccaatctttaattcaagcagatattagaccgacgtagatgctaaatttacgatttgctacatcaaatttgaattaattttgttgaagaaaagaaaggctaaacagaaaaaggaggctaagcatatgcacatgttacctttataaatagcctcctgccttcctggaattaacaaccacgcccttggcacatttttccttcaccccctcgcatcatcaggaatagcaaatcagcccccgcctctcttcccgcctaagcttttgacgccgccacgatggcttccacgtcaggcacagcaaaagaccagccggtccatggccgcgccacccaacgtcgcgagtccacctccacctccaccgctgcagccgagggcggcgccgtcgcctcgcagccgccgcgcccgcctcagccccggcccggcaccacccgcccgccattatggcgtccgccgcgttggccatggggctccagctccagcgccgccaccgccgcggcacccggtggtgcttcgaccgccgctgcagcccagggcggcggctccgctgcctctcgcccgccgcgaccgccgcgcccgcctctgccgccgcggccaccgcgcccgcccctgccgcctcttcgagagcccggagagggaggaggccgcggcgacggccggggcgccaccggcaccggatcgagctccgccgctgcagcggtcgaccggaaggggaagaagaaggtcgacgaaggtgatcgggatccggaacaggtgaatggctcctaccacctcgcattcctgtgccatcatcgcgttttgggggtggatttcgatcctgttcttgagcgtttcttggtttggttttcccttgaaggcgctaaggaagtctggtccccttgaagggaagttactccagagcagcattcgtgcgtatcaagggccccccgccgccgagaaaccatccggcgcgccgccggcagcaacaccccccgcccgcaacaccggccgtctggggctctccgaccgtgaggcagatgatgccttgaacgatatcgacctggcgatggtgcgtatgccatcgattattctgggcatcttgggagctttgttgttctaattgttcttgagcatttcttggttggtttctctggagtaggccaggcagctacctgttgttgataccactgttcagaaggaggaggaagagaaggagaaagagaaggagaaggaggaggaggaggatgatgacgacgatgaggagggggagctgctgtcgcacgtttccaggagaaagaacccactccggagtagaattgatggctacatcagcatggtaaggggaagtttattttactttcttgtctgggctggacattcttgtgccaaatttttgtgttcaggatgtgggattgcttcctaccattcttgtgaaaccatggtgaatcttacatccatgcttaggtgctagtattctgttgtttgcatgtggttcttgtgcccaatttttttttgaaatcgtcttgtgcccaatttttcatgttgaaaatggtgaacttggaggatcttagcctacgtggtttctgtctattcatctaaagtcttggatgatttggtgaatgaataaatcttggttgaaatgcatatgttgcattctagagccgaattgatatgttgccaaccaatagtgggatcgctgcatctaaattgacagcattaagctgaatggtattaagaggttttttggttgtgctactcttaatgtagactattaatttctggtgtagaaatgggggaggcaggtcctgtgtttctcaaaaaagaagttgcattctagaacaggagtccaaatcattaggcgtgttaggaaaaatttgacttccgtattatccgtaggttgtcctgcgaccttctttggaaatacatgcagcaaccttcttatgctttgtcgaaattgttgaagaaaggcactcttgcttgcattagttttgcttgctgtttactgtgatctgcttttcatctcactataaacaactaacaatgtcggaaaatattgtatcatgtcattattactgcgatatctttggtgagaaatcctaaattcacatggcttgagaattcactgttagtgaattgtgttataccagttttgcattggacccactttctgtttaatgtgatctacttttcatatcactgtaaacaactaacattgtaggaaaatattgtatcgtgtcattattactgcaatatcttggtaagaaatcctaaattcacgtgacgtgagcattcactgttagtgaattgttttataccagttttgttcactgttagcatattgttagcatttgctgttaggacatgaatggcaagcgtagagcaattctggaaataccagttctgttcccctgctatattggtgtttacaagttccacgcattccctgtttccttggtacttagcctaaaatgattgttcttgatataaatactctgtaatcccctaatttgtgctgcgtctggcattctatatgaattttgacccctttttttcccttgtgggatagcttttatgtagaaaaggaagtctaacgtgtttctccgatgtgaataacagaacagacctgccaactcttgtgaatcaccaggtttgactccttttaatctttgataatgttgaaaatgaatgtatatgaattataaatgtgatcaaagcccttaaatatcatactgttctatcgagctatcttttcttctctatatactatcatactagtgtttcacatgcaattgacattactggattgtggcagaacctgaatcagcctagtgctgttcaattttttgacaggatagcatctttttactaaacaacaactgatctatgtcaattatactggatactgattttaagaacctgtcggatattgcagaaactagaaaattgccatgcaaaacgaagttatatttctttctagttgtactatttcctacatcagatggccatgagctgaattcccttatctgtgtctgtggtgcagaaattttccatggaatttgctcctgaccattattgtctaccgggtttgcggggaattatttcttcaaattttctgatccttgttagcaagtattcagaatttagggcagtgcatggagatggggaatgtttctacaggagcttcataatttcctatctggtagctgacatgttggcctcctccctgtttctaagcatagaatgtatgcttggtgatttattccgctttgtttggcaggagcaagtccttgacagggaggacacagatgaggaacaacgcctccttgctgcccttgaaattgaagttaaaccaatggctatgcaaattgattatcctgaatgggcaactgcattttcctggggccacgaagtaatcagtcaccttctatgtatttatttgtttatctttcttatagaaacaagcttgtaagagatgattctctacaataaatgccttccttcttactactctcttatcaattatttgcttcctaaggtttttgttatatctaatgtttacctatcagagattctcatatgagttatcctattatatttattcatgtcttaatatcaacgatatgcattttgcaagcttcattgtaatatacctgctaaactcttgaattcctcttagagtgcaaaatgccatccgtttgtaaggtataccatgcgtgatttactgcatcatcgattctcaggtatttaagaagctgatagagaacataattggatggaagaatccagcatcaacatacaggtatttatatgtttggttcctatagtttcaacaaattgttgtttatccatcccactgaccacatatgggcgctttttttcagccgtaagcaggaacttctggggttcttcagcagtaaaaggatgtcgaatggcagtaagaacaacatccttcagtttatcttccttctattcatcctaattcttgtttctgaaattctgtttcgtcagtttttgttttcctcagatcattagcagctacctggatttgctcgcacaaggacgagtatgaacagtatgtagatgatcttggagatgattaccccctggaatttgttagtgccaacatcatttcccttacatcaactcgtttctgaactgacagtgcaacgattcttgaattcttttggcactcatttcaccttacctgttttctctgcaagcagtggtgtgctaccaatctccttccacctcgtctgtacacagaccatgttccaatgagggccttggcagccgcgtttagggtgcccctccaagtggaaaatctgcataatggaccagctcaagatatctacaccgcggatggcgtcgacgttcctcgtgtcaccttgctgtacacaggtgcccactatgatatcctttacccacgccctcctggtgagagatcgagacgacgggctgcaggttggctttgtcgcttctggtagggagagagctgagttggattgctgcagatgagtatgagcattgccgagctaggtggtagaaaaattttgacttctagatgaaagtaggccttctttcttctactggtgcggtggtgcatgcccaccccattaggctgatcaatatatcatagttgccgctcactgttctgaaaattgtgactaggatagaaaaacctgtgctgtaatgtcatctgggaccattggtgtaatgtgatggccttgattcttttgcagcaacttgtgattcttttgcatcatacatatgctgtacattctttctttcttgtgtttgtgcccatgggtggatcaattgtaatagttgtgcagttttctgaaactgtgacaaggagaagagaaacatgtgttgtaccggcgtttgagtccgtgatgtgtcctgtgatcatatgatcatgaattattcttctgaaacttgtgattaagttctcttaagagcctttgctgcagaaatttttttcccttgtagataaagaacactatattggaatcctgattagtttcgttgttctaataaacttatccacatcattcttgtccatatattgaatatttacctggacttgtctggttgggagaggataggatagaataattatcattcactgtttgattgcatttataaaacatcccatttttaaaaaagttgcaatgattgtatagatcgtatatgattaagtcatatatgatcgcattggctatgttctttgccctgggttcccaacccccctctctctcgttttccgcgctaaacggtgtggttttttaaaaaaagtttctagacgaaagttgctttaaaaaatcaaattaatctattttaagaaaaaattagctaaaacttaattaatcacgtgttaatggactgcttcgttttccgtgcggaggagatgggttcctaacccccattagcgaacacaccagtgaatgatgacgtggatgatgttttgtcacaaaaatcggctgcaaagagcaaagaactggaactcgtagatcacaactagcctcggtctcgtctagttgcccatcgtattatttatcaaaattgtataataattcgccattcacattaatgtatataaatttgattttaatacgattttgaagtattttagagtaatctattgtttatatacgtttgtatgtacactaatgtaatataaaaggcacgatttggaaaatgggtgaataaatagcacgaatttaaaactgagtcattcaatatatgggtaaaaaatacccatctctaaaatatatatatggatatccaagttagctaataactcagttagcaaactaatttcctgacgacattgcgggtagggggatttggtttgtttgccgatgggggtgccagatccactccgacaccgccggggatgatatgggatggtacgagtagaggtgaaaacggagcggatttggatggatagtagttataccatatcctaaaccatatttttttaatcggattcggagcagttgcggatagtgtgtggatgtggagcggattgttttcggatgtcggaaatggtgcagaatcggttcggacacggattaaatttatcgaatgttacgtgtatatgcaatcaatacaacatcgagttagcaatgcaatggacaataatacaataaccaataaatgacccatcgtaataattatatgcttaagtactaaacaacataaatacatgatgtccataatataaaaatacagctacgcaagtataacatgagacggtgaaaatctcagactaagaaatttaggttaattgatgaattagaccgttggatgaaccaacttatgttatatgtaatagatacagtggttacatgtgttgataattttggattatctagctaacggtctatcagataatccgcatccgcatgctttcagagataccatatccgcatccgcatccatatccgccggatttctaaaagcctataccatatcctcgtttcggatggatttggagcggatcggatcggatattatccgatccgttttcacccctgggtacgagaaatagtgcgttcatgaattagatcgtaaaaaaggtgagacatatgtctggtccattaatttttatcagtcctactcaatactataaaaagatcaatcgattaaattaattttgtattgaaaacaaacttcatattaagcaatccttcttgacctagcgcactatgatatcctggcccaattaaaatgagacatgtgtaatccacgagagttgtttgtgcatgcttagtaccaccttactagtttagcaagggtggaaccagcttataaggcctcttgcctccaacggtatcactctcgggttaacccttttacatgaagcgatgatgtaagtataagtgaagtggtatatgtaagtgggcccgtttgtcggttaggctgggctgcgcagttctagagggacgactgttacacatataactaacacatggtattttctaaagcttactaattttaaaataaaaaatacttcagatttttatagattttggtatgaaaaacaccattgttacacatataactaacacatggtattttctaaagattactcattttaaaataaaaatacttcaaattttatagaatttggtatgaaaaacaccatatttctctatccgagctgttgggttgtccacgaaaaacaatattgctatgcctatgttaggtttgtcaatgagctgagcttacttacctaggctcgagcttgatacaagctcaaaccgagctcgagccaagcctgtgtaacctttgagcttaactaccgagcttgatttattagtacaatgtatatttcaagaataatctcttgaaaaaaattctagttaaccacattaaagaagagaagaaaaagaataagataaatatatgattgcaacataagctatattttattatgtgaatatatacaaatggcatatttatctatactggtttattaaaaaaataaaaatcatatattgttatgtttgttaggagctcgagcttgactggacaaagctcgcaagctttggtatacgctcgggctcgactcgtctggaactccagtcgaggttgaaactagcctaggacgaatcgagctcaagcagcctgtgagtctctagcttttctgatagccctagtccatgtaagttactttatgggtaggcggcacaatactatagtatacgataccaaagatgtctcgggcatgacccatggttataaattatctgaaagaaaggttccaatgaaagagaatttatgattgactcatatgctatgggtacccttcgtgtttgctacttaggctggttataaaaataatactattagatagctgtttgagagaagataattcattttggaccgactaaagtaaagggataagaacacaagtatgagcaataaaatgctatggccatgcataatgccttaaaaaagaaagagtaaaatgcatgaatgaccatttaacttgtttagatttatcatgcaggtcattctacttttagaatacacatttagatcactattttaagttaagctaactattcatatgtcatctatgattggaaaaatgcttttggacttggcaatatacaaaattagaagaactaaatcatatcacttgggcatgttttaatgagttctcttagttcttagtcctctctctcacttaccatcaatcccgccaacggtagcggccgataggctgaatataaacagcgatggaaacaaaatcttaggaggcaccgactaaagatgtccaggtgcaaatttttacaattcaaggtggcatgctatgcgtaccaggtgtgctcatatggatagttagatgattaaatgacacacttaactcatgttagtgattaagatgtacattttaaaagtagagcaatatatatgacacatccaaacaagttgaatggctctccatgtattttactaaaaggaaaattcaagaggtttagggccaacacaaatattacatcaatacaagtcacaatatgaatgaatttctctcgaataattgattttcttttacacttaataagtatggttaaataacatgaaagaatgttattccatgcaagtgaaaagagaatgttttcataaaggagggtttcatttgaaaagattaggctgatatagtaatataaatgctaaatcaactaggattttgccacatcggatttaaattacttttattgaagaaatgaggaaaaactaaactgaaaagaaagaaagaaaaataaaaaccccgtctgctggactccataggtagcaactgcctacgaatgctacatttataaataccctcctgcctttccagaattgacaaccacacccttgaaatatttctcctccgccccctcgcgtcagcggaattagcaattcagcccctgccactcatcccgcctaagtttttccccccgcccgccacgatggcgtccgcgtccgacccagcagaagtagagctccatgggcagcgcgagccccacgcctcgagctcctccaccgatgcttcgatccccgcgccgacctccgccgccgccgccgccgccgatgtccctccgcctccgtcgtcgtcgtcgtctccgccgccgccgcctccctcgtccgtcgagggccgcaccaagcagcccggaggcggaggccgcggggccgacgccgcgtcgagcacctccgccgcggcggcggtcgagcagaaggggaagaagaagatatcggcctcggatgatcgggagcaggtgaggattcctaaatcttttgcgttcttgctgtcattgcgtttgtgcctggcatcttggggttttggtggggttttttcttttttttgttcttgagcatttcttggttttgccctgaaggcggaaggggatgaggaggagaggaaatctgattcccagaagaagaagctagccgggaggaggaggaggaggagattaaatcttgctgcgtatcaaggcgacgccaagaaaccatctgatgatgtcaacctggtaatgatgctgcgtattttggcatcttggagttttggggggcttttgttcttgagcgtttcttggtttctatggtgtaggccaggaggcccgggaagctaccttgggatgatcccagagtttggaaaccgcatgtgacgcccgtttccacggtaaagaagtcactcgggattagcatccttgtctatatcagcaacaaggtaaggagaagtttctgtttctgttcttggctgggctgagcattcttgcgccaaaattttgtgccctgtttgtgggattggttcctgccgttcttgtgaggaaccatggaaaatcttgcatccttgcttaggtgccaatttgcttgttggaaatgttgaactgggatcttggccctcgtgtttctgtttattcgtgtgaaatcttggatgatttagtgcaattgagcgaagatgtcttagctgaaattatgatgcactctaaatttgggtagagatcattagtgatttcagggaaaatttggctttctgttgaaatacaggcaatgacctgcttgggaaatacaggcagtgatcttcttgcttgcattggttcggcttgctgttaatgtgacgtacttttcatttcactgtaaaaaacgagcaatgtaggaaactactgtatcatgtcattattactgcgatatcatggcatgttcactgttattgaattgtgttgtaggaagtcaatctagatgtatatttgggattgcattactgaacgcaaattctatattattgatcgcctgtatgtaaaaccagcgatcatactttagtgttcagttgaatagattcaacctctgattggttgctacttgaaattggtgggaaaacttaggacataaatggcaagcgcagaccaattctagaaatatcagttttgctctcttgctatatagttttttacaagttccatgcacaaaatgttttatctttgatgtaaattctttgtagtcagtgctaattctgccattctatataattttgaccctttttttttcttgtgggttagtttttacgtagaaaaggaagtccagctgggttctccaatctaaaatacaagcagcaacctcttgtgcaacatcaggtttgactctttttatcctttgataatgttgaaattatcctttgataatgttgaaagtggatgtgtataaattataaatgtcaggattagaacccttaaacatgatattgtggatactcacgaatttttgtttgccactaactgtttgatcaggctaccttttcttgtctagatactatcatactagttgtgtttcacatgcaattgattgcactggattgccgtgggacattaaattggcctagtgctctttaattttgtgagggacatgatttattgtactaaccaatgaccgttctgtgtcaactatattcgtgagtgatttcaagcatttgtcagatagtgcagaaaccagaaaactggaatgcaagattacattgcattttagttctacatgatcaaatgtccataagttgaatcccctcatttgtgtctgttgtgcagaaaattcccctggcttctgcccctgaacattatgggctgcgatcaggtttgcggcgaattatgtctgcgaatttgctgatacttctcaacgagtattcagattttaggccggtgcatggagatggggaatgtttctacaggagtttcatattttcctatctggtagcggaccagttatcctcctccctgttccttagcatagcatcgtatgcttcatgtttggtgatttattcctttatttggcaggagcaagttcttgacatggtgggcacagatgaggaaaatcgcctccttgctgctgttggagcaattgatcatcgtcaatgggcctctggattttctcagagccacaaagtaatcactcgccttctctgtattgtttttttgttcattctgattgaaaaatgcgtttcagagacgactctctccgcgaatgcttgtaacgttttttcttttagttaggccctttacttaatgtttaactatcacagcttctcagacaagttatcctactatcttcattcttttctaaatatcgatgataagcattttgcaagcctcattgtaacctgttaatctccagtctgtgtgcgaaaaatgccagctgtttgtaaggtttaacatgcacggttattgcattactgactctcaggtatttgagaagctgatacagaacgtgatgagatggaagaggagacagaagggtgtagcatcagctgacaggtgtttatatgcttggttcctacagttccaacagagtgttgtttgtaaatgcatcccatcccactgaccacatatgggcgcttttttcagccgtaggcagaaacttctcgagttcttcagcagttacagcaagtcggatggcagtaagaacaacatccttgagtctacgttcctttgattcatcctaattcttggttctgaaacttcttttttgtcagttttggctttcctcaaatatgcagcagctaactggatatgctcgcacagagaggagtatgaaccgaacatagctgggcttggaggtggctacaccctggaagctgttagtgccaatatcacttcccttgctcgtttctgaacttgcaacaattccttaacacttgatactcatttcactgtacctgtttgcttgcaagcagtggtgcgaaatctatcttcttcagcctcgtgagcaaactgaccatattcagatgacggccgtggcagccgcgcttggggtgcctctccgagtggagaacctgcataatggaccagctcaagatatctacactgccgatggcgttaacattcctcgcgtcaccttgctgtacacaggcgtccactatgatatcctttacccacgccatccttctggtgggagtgggagtaagagctcgacacaacgggctggttgctttcgtcccttctggtagggagagagctgagtttgattgctgcagatgagtatgaacattgccgaaataggtggcagacaaattttgactttttggtgacaaggagaagagaaatgtgatgatcttgattcttttgcaacttaactgtgattaagttctcttaagtgtctttgcagcagaatattttttcatgtagataaaagaaaattatattggaatcctgattggtttggttgtgctgaccaacttatgcacacccttgttgtccatatattgaatatttgcctggacaagctttctggaactgatggtttccctggactagtttggtggggagaatgaggatgaatgagatggtgtggtacaaggtgggtgaaatggtttaggatggaatgctaatcattgactgcttggttgcagttataaaacaaacaaaaaaaatggtctaattgcattagttgtatgggatgatataggatggtacaacaaattgtcctttgatagaagtaaatctatatataggtggtgtatgcatacgcctgactcgtgtttacaatgtaccagtcctaagtaaatacctcttttaataaataacattgttaactttttggtaatgttctataattcgtcttatttttaaaaattaatataaatatgctagaatgtaagtcatatttaaaatttctttgattgtacaatatatcacaacaaaataaataatatatgcaatttttttgaataggatgatgatcaatagtcggcatcatgtataaaagaacagagtgagtgtaaaaggaaaaaaaaaatctatggattaaaattaaatttgtaaacaatcctcatttgaaagcaagaccttgtggacgcgtggtcatttaattggtaaaatcttgtgcaaactattacatatacattactccctccattacacaatataaatcattctagcatttcccacattcatattaatgttaatgaatcttagacatcaatatgaatatgtaaaatactagaatgacttacattgtgaaatgagggaagtattaaccaagtactccctccgtattttaatgtatgacgccgttgattttttaactgacgtttgaccactcgtcttatttaaaattcttatgcaaatataaaaatacttatgtcatgcttaaagaacatttgatgataaatcaagtcacaataaaataaattataattacataaattttttgaataaaataaaaggtcaaatgtttattaaaaaattattaaaacattaaaattaaaatacagagggagtagtattcttaataaaatgatgcaaatgtcactaaacatttatttagtttgagaggaacattatcttctttctttgactgctcccttcttctacctcctctactgtatccagtgctgctgaaggcgaggcgagcacacatggccatgggggatgactactccaaggcgaggcaagccctggcggtgagcgcccacgagtgctcgctggtggacgcggtctcctccgcggccacgccgccgaccgcggacgacggggaggggcacgcggcgggcttcttcgagggcttcgtgctgggcgggatccgcgtggacagcgtccgcccgggcctcgtcgactgctccttcaccgtcccctccaggctcaccgtgagtcgccgccgccctattctcccctgatctaccgattttggattcgagatcagtcaaatccgaatttgggcgcaggatcggagcgggtgcctggccgcgggcgcggtggtgtcgctggtggacgaggtggggtcggcggcctccatcgccgacgggcgccccgtcaaggtctccaccgacatgtccgtctccttcgtctccctcgcgcaggcccgccccggcgaccgcctgcggatcacggccagggcgctcggccacaagggggcgtactccgccacccacgtcctcatctccaacgccgccaccggcgaggtcgtcgccgagggcaggcactccctcttcggcaggatgaaggtcgtctccacctccaccgccaccgccaccagcaagctgtgaccatggattccaccctgctgccatggttaattaaagtgtgagtattatggcccttctaagtagcgtaataaggaggttttgattttgatcacaaatgtcttcagtatctgattgagcatacgacacacctgaacctgattataccatttttcttttttgctttactagctgtaaattcagttatcgaattacctgccccagtacagtgttaataacattgtcaactttcattatctgggtcgccaagtttgggcgttcattcattttatgttcattagtttcagagcagttgatagagtatatgaaaaataaatgaaaagaattgtaactatttttgtctttgagatttatggattgcagctcgaaatgctgttgaaagcgttaactggtagtttggtagaaagggagtatgagtatgagcatgttgcgcagttcaacactaagctcaattcccacgcgaatttcgtgaggtcgaattctgtttgctaggtgtgttagcgaaaaaactgctatttgttaggagataaaggatgattcctccaatgtgctatcatgaattgagagttggatggtttcatggtgtcatctaattggtgtagtttttcattttgacattcacatttggtaggatgtaaggagtgttgatgaatcctggaaattctaccttaaaggaatgtctgatttagcactacttactgctcctcataggagaatgttgaacttgtagtccattaggcatggttgtgcgttgcaattaatttataggtaaaacttttatatatgcgttatatgcaatttaaaagccaatgttgaaaaataaaccacattgaaaatatcttaaaatcttattcaaaattaagtttgaaaattcgatttttggctgtctttagcttactagagcaaccaatgggactctaaaaatcttgcttacacttaaccatcgtttaattttgccacctggccattgatttgtctgttgttgttgtcgtcgtcgttttgtgagtgcgtggaaagagggcgggattgctaattggcgtgcacgcgctagctaacgaagtagcgcgcgtttggcccaccaggttcatatttcagcccagtccgagaagcggcccatgcgtgtacgggagatcacgcggtgatgaacgctgatctgactgatctttaatcgtgaatgctgatttgatttttttctatttttgggagacgcgcgcatctaccgtaataactctgtttagttttagatacgtaattaagagatacgtaattaaggtaagttttttttctctctttttaagtgtttttattaacagattgaaagaaatctacccatgaaaaaaactttcaaataaaattgaaaactttctattaaaaaattaaaaacatacctaaagttttaaaaattcaacttaaaatttgaaactctaaacacaaaatttaaaaaattacaagggagaatagcctatttggtccctaaagtttcgtcttaaggtcaatatggtacttaatattttattttgtccaatcagatgcttaaactttatcatatggtccaatatgaattttaggcccaccagaaacaccatgtagacatgccatgtcatcatcttattaaaaatggatagtgaaatatctaatttgtctatttgcatgtgatacaaaatactagaactaattaatcttatatgattagttaatttaatctaatcccaggaattgatataaacacaaaatggattatgttacatctatatacgaatcgatatatttgattatttgcgaatgcaagtgtgtatgacattttttctttttcttttttcactcttatgttgtatgtaagggtatattaggcatttcatgacagatttgtataagatgatgagatggcatgcctatgtggtgtttttgggtccaaggaccatagtatactgaaaaatagactttgaggaccaatttgaaccaattaaaatatcaaggaccatattgacctcagagcgaaagttgaagggccaaataggctattatcccaaattacaacttgtaatttgaaactttcaactcaaaatttgaaaaactttcaatttaaattggaaaactttcaagtcaagattttaaaactttcaactcaaaatttgaaaactttcaatttaacttggaaaactttcaagttaatatttgaaaactttcaatttaaatttaaaaactttcaactcaaatttgaaaattttcaatttggattggaaaactttcaagtcaagatttgaaaactttcaactaaaaaaatttgaaagcatgtatgttgcggattgaaaacaaatggaaagaacaagtaaaaaagttaaaacgtgacgaggagagggtgcgcgaaaataggagaaaatcgaaagaaaaaaggagaaagaaacacatgaaacaaaactagcagttgtattgcaaaaaccagcattggcatcagagcgatttggctgctccggcctaccgccaacgtgcctaattttacagctatcacggcgaccccgcgtcaatctcgtccatctactcggactgcaagggatcgcattggggcttttcctccggctactccaccttgaaacgacaggaacggctcaacatcctcgttgtcaacgtcctcttcgagtcccattaataaccctaataaattgaagtcaaagctaaaatttaaattttcaaactttattttgatattaattttaagatatttttaacatagtttcttttcaagtattactaggttttaagttgttacgaacacatatataaaacttttacttataaattatttttttatttcctaataagccgtttgatttattaagaaatatgggcaaatggttaccgcctacttcttgttctcctttagggatggcaatttccccagtggggggatccagccctacgagggcgggggcgggggcgggtgtgatttttgacccgtgggggtgtcggggatggggccccgcatttgggcggggaggggacgagggagacatttcacccgtggggtcccgggggtgtatataaacggttttgctatagcgcgtacgcgcgacttctgtaagtagcgtgcgtgccacgtggcgggccctcgtacgcccccgcgcgtttctctttttttttcgcttttttttctttttcttttggcgcagctgccgtcatttccttttttcctttttttttcttttcgcagtttactaccgcactcgtgtaggagtaggagttgagatttgaaattttcaacttagatttg
